(19) United States
(12) Patent Application Publication
(10) Pub. No.: US 2024/0401004 A1
(43) Pub. Date: Dec. 5, 2024

(54) DHFR TUNABLE PROTEIN REGULATION

(71) Applicant: OBSIDIAN THERAPEUTICS, INC., Cambridge, MA (US)

(72) Inventors: Vipin Suri, Belmont, MA (US); Dan Jun Li, Cambridge, MA (US); Dexue Sun, Cambridge, MA (US); Byron DeLaBarre, Arlington, MA (US); Vijaya Balakrishnan, Cambridge, MA (US); Brian Dolinski, Cambridge, MA (US); Mara Christine Inniss, Beverly, MA (US); Grace Y. Olinger, Cambridge, MA (US)

(73) Assignee: OBSIDIAN THERAPEUTICS, INC., Cambridge, MA (US)

(21) Appl. No.: 18/787,024

(22) Filed: Jul. 29, 2024

Related U.S. Application Data
(62) Division of application No. 17/646,212, filed on Dec. 28, 2021, now Pat. No. 12,104,178.
Application No. 17/646,212 is a continuation of application No. 16/558,224, filed on Sep. 2, 2019, now Pat. No. 11,629,340.
Application No. 16/558,224 is a continuation of application No. PCT/US2018/020718, filed on Mar. 2, 2018.
Application No. 16/558,224 is a continuation of application No. PCT/US2018/020741, filed on Mar. 2, 2018.
Application No. 16/558,224 is a continuation of application No. PCT/US2018/020755, filed on Mar. 2, 2018.
Application No. 16/558,224 is a continuation of application No. PCT/US2018/020768, filed on Mar. 2, 2018.
Application No. 16/558,224 is a continuation of application No. PCT/US2018/020704, filed on Mar. 2, 2018.
(60) Provisional application No. 62/542,400, filed on Aug. 8, 2017.
(60) Provisional application No. 62/484,047, filed on Apr. 11, 2017.
(60) Provisional application No. 62/466,603, filed on Mar. 3, 2017.
(60) Provisional application No. 62/484,052, filed on Apr. 11, 2017.
(60) Provisional application No. 62/466,601, filed on Mar. 3, 2017.
(60) Provisional application No. 62/484,062, filed on Apr. 11, 2017.
(60) Provisional application No. 62/466,601, filed on Mar. 3, 2017.
(60) Provisional application No. 62/555,316, filed on Sep. 7, 2017.
(60) Provisional application No. 62/466,601, filed on Mar. 3, 2017.
(60) Provisional application No. 62/484,060, filed on Apr. 11, 2017.
(60) Provisional application No. 62/555,328, filed on Sep. 7, 2017.
(60) Provisional application No. 62/466,601, filed on Mar. 3, 2017.
(60) Provisional application No. 62/484,063, filed on Apr. 11, 2017.
(60) Provisional application No. 62/542,402, filed on Aug. 8, 2017.

(51) Int. Cl. C12N 9/06; A61K 39/00; C07K 14/54; C07K 14/705; C07K 14/715; C12N 15/85

(52) U.S. Cl. CPC C12N 9/003; A61K 39/4611; A61K 39/4631; A61K 39/4644; A61K 39/464412; A61K 39/464417; A61K 39/464838; A61K 2239/31; A61K 2239/38; C07K 14/5434; C07K 14/5443; C07K 14/70503; C07K 14/7155; C12N 15/85; C12Y 105/01003; C07K 2319/30; C07K 2319/33

(57) ABSTRACT

The present invention is related to compositions and methods for the regulated and controlled expression of proteins.

### CROSS REFERENCE TO RELATED APPLICATIONS

[0001] This application is divisional application of U.S. patent application Ser. No. 17/646,212, filed Dec. 28, 2021, which is a continuation application of U.S. patent application Ser. No. 16/558,224 filed Sep. 2, 2019, now issued U.S. Pat. No. 11,629,340, which is a continuation application under 35 U.S.C. § 111(a) claiming the benefit of, and priority (under 35 U.S.C. § 120) to PCT Application No. PCT/US2018/020718, filed on Mar. 2, 2018, which claims priority to U.S. Provisional Application No. 62/466,603, filed Mar. 3, 2017; U.S. Provisional Application No. 62/484,047, filed Apr. 11, 2017; and U.S. Provisional Application No. 62/542,400, filed Aug. 8, 2017. The entire contents of the aforementioned applications are incorporated by reference herein in their entirety.

[0002] U.S. patent application Ser. No. 16/558,224, filed Sep. 2, 2019 is also a continuation application under 35 U.S.C. § 111(a) claiming the benefit of, and priority (under 35 U.S.C. § 120) to PCT Application No. PCT/US2018/020741, filed on Mar. 2, 2018, which claims priority to U.S. Provisional Application No. 62/466,601, filed Mar. 3, 2017; and U.S. Provisional Application No. 62/484,052, filed Apr. 11, 2017. The entire contents of the aforementioned applications are incorporated by reference herein in their entirety.

[0003] U.S. patent application Ser. No. 16/558,224, filed Sep. 2, 2019 is also a continuation application under 35 U.S.C. § 111(a) claiming the benefit of, and priority (under 35 U.S.C. § 120) to PCT Application No. PCT/US2018/020755, filed on Mar. 2, 2018, which claims priority to U.S. Provisional Application No. 62/466,601, filed Mar. 3, 2017; U.S. Provisional Application No. 62/484,062, filed Apr. 11, 2017, and U.S. Provisional Application No. 62/555,316, filed Sep. 7, 2017. The entire contents of the aforementioned applications are incorporated by reference herein in their entirety.

[0004] U.S. patent application Ser. No. 16/558,224, filed Sep. 2, 2019 is also a continuation application under 35 U.S.C. § 111(a) claiming the benefit of, and priority (under 35 U.S.C. § 120) to PCT Application No. PCT/US2018/020768, filed on Mar. 2, 2018, which claims priority to U.S. Provisional Application No. 62/466,601, filed Mar. 3, 2017; U.S. Provisional Application No. 62/484,060, filed Apr. 11, 2017, and U.S. Provisional Application No. 62/555,328, filed Sep. 7, 2017. The entire contents of the aforementioned applications are incorporated by reference herein in their entirety.

[0005] U.S. patent application Ser. No. 16/558,224, filed Sep. 2, 2019 is also a continuation application under 35 U.S.C. § 111(a) claiming the benefit of, and priority (under 35 U.S.C. § 120) to PCT Application No. PCT/US2018/020704, filed on Mar. 2, 2018, which claims priority to U.S. Provisional Application No. 62/466,601, filed Mar. 3, 2017; U.S. Provisional Application No. 62/484,063, filed Apr. 11, 2017, and U.S. Provisional Application No. 62/542,402, filed Aug. 8, 2017. The entire contents of the aforementioned applications are incorporated by reference herein in their entirety.

### SEQUENCE LISTING

[0006] The instant application contains a Sequence Listing in XML format. The Sequence Listing, named 2024-08-16-OBS-008US3-108407-1457134.xml, which was created on Aug. 16, 2024, is 12,059 Kilobytes in size, and is hereby incorporated by reference in its entirety.

### FIELD OF THE INVENTION

[0007] The present invention relates to regulatable tunable biocircuit systems for the development of controlled and/or regulated therapeutic systems, including polypeptides of biocircuit systems, effector modules, stimulus response elements (SREs) and immunotherapeutic agents, polynucleotides encoding the same, vectors and cells containing the polypeptides and/or polynucleotides for use in cancer immunotherapy. In one embodiment, the compositions comprise destabilizing domains (DDs) which tune protein stability. In particular, regulatable biocircuits containing destabilizing domains (DD) derived from human dihydrofolate reductase protein (hDHFR) are disclosed.

### BACKGROUND OF THE INVENTION

[0008] Safe and effective gene therapy requires tightly regulated expression of a therapeutic transgenic product (e.g., the protein product). Similarly, the analysis of gene function in development, cell differentiation and other physiological activities requires the controllable expression of a protein under investigation. However, current technologies do not allow titration of the timing or levels of target protein induction. Inadequate exogenous and/or endogenous gene control is a critical issue in numerous gene therapy settings. This lack of tunability also makes it difficult to safely express proteins with narrow or uncertain therapeutic windows or those requiring more titrated or transient expression.

[0009] One approach to regulated protein expression or function is the use of Destabilizing Domains (DDs). Destabilizing domains are small protein domains that can be appended to a target protein of interest. DDs render the attached protein of interest unstable in the absence of a DD-binding ligand such that the protein is rapidly degraded by the ubiquitin-proteasome system of the cell (Stankunas, K., et al., (2003). Mol. Cell 12, 1615-1624; Banaszynski, L. A., et al., (2006) Cell; 126(5): 995-1004; reviewed in Banaszynski, L. A., and Wandless, T. J. (2006) Chem. Biol. 13, 11-21; Iwamoto, M., et al. (2010). Chem Biol. 17(9):981-8; Egeler, E. L. et al. (2011). J Biol Chem. 286(36):31328-36; and Rakhit R, Navarro R, Wandless T J (2014) Chem Biol. September 18; 21(9):1238-52; Navarro, R. et al. (2016) ACS Chem Biol. 11(8): 2101-2104). However, when a specific small molecule ligand binds its intended DD as a ligand binding partner, the instability is reversed and protein function is restored. Such a system is herein referred to as a biocircuit, with the canonical DD-containing biocircuit described above being the prototypical model biocircuit

[0010] It is believed that improvements of biocircuits, including those containing DDs can form the basis of a new class of cell and gene therapies that employ tunable and temporal control of gene expression and function. Such novel moieties are described by the present inventors as stimulus response elements (SREs) which act in the context of an effector module to complete a biocircuit arising from a stimulus and ultimately producing a signal or outcome. When properly formatted with a polypeptide payload, and when activated by a particular stimulus, e.g., a small molecule, biocircuit systems can be used to regulate transgene and/or protein levels either up or down by perpetuating a stabilizing signal or destabilizing signal. This approach has many advantages over existing methods of regulating protein function and/or expression, which are currently focused on top level transcriptional regulation via inducible promoters.

[0011] The present invention provides novel protein domains, in particular destabilizing domains (DDs) derived from human dihydrofolate reductase (hDHFR) that display small molecule dependent stability, and the biocircuit systems and effector modules comprising such DDs. Methods for tuning transgene functions using the same are also provided.

[0012] Cancer immunotherapy aims to eradicate cancer cells by rejuvenating the tumoricidal functions of tumor-reactive immune cells, predominantly T cells. Strategies of cancer immunotherapy including the recent development of checkpoint blockade, adoptive cell transfer (ACT) and cancer vaccines which can increase the anti-tumor immune effector cells have produced remarkable results in several tumors.

[0013] The impact of host anti-tumor immunity and cancer immunotherapy is impeded by three major hurdles: 1) low number of tumor antigen-specific T cells due to clonal deletion; 2) poor activation of innate immune cells and accumulation of tolerogenic antigen-presenting cells in the tumor microenvironment; and 3) formation of an immunosuppressive tumor microenvironment. Particularly, in solid tumors the therapeutic efficacy of immunotherapeutic regimens remains unsatisfactory due to lack of an effective an anti-tumor response in the immunosuppressive tumor microenvironment. Tumor cells often induce immune tolerance or suppression and such tolerance is acquired because even truly foreign tumor antigens will become tolerated. Such tolerance is also active and dominant because cancer vaccines and adoptive transfer of pre-activated immune effector cells (e.g., T cells), are subject to suppression by inhibitory factors in the tumor microenvironment (TME).

[0014] In addition, administration of engineered T cells could result in on/off target toxicities as well as a cytokine release syndrome (reviewed by Tey Clin. Transl. Immunol., 2014, 3: e17 10.1038).

[0015] Development of a tunable switch that can turn on or off the transgenic immunotherapeutic agent expression is needed in case of adverse events. For example, adoptive cell therapies may have a very long and an indefinite half-life. Since toxicity can be progressive, a safety switch is desired to eliminate the infused cells. Systems and methods that can tune the transgenic protein level and expression window with high flexibility can enhance therapeutic benefit, and reduce potential side effects.

[0016] To develop regulatable therapeutic agents for disease therapy, in particular cancer immunotherapy, the present invention provides biocircuit systems to control the expression of immunotherapeutic agents. The biocircuit system comprises a stimulus and at least one effector module that responds to the stimulus. The effector module may include a stimulus response element (SRE) that binds and is responsive to a stimulus and an immunotherapeutic agent operably linked to the SRE. In one example, a SRE is a destabilizing domain (DD) which is destabilized in the absence of its specific ligand and can be stabilized by binding to its specific ligand.

### SUMMARY OF THE INVENTION

[0017] The present invention provides novel protein domains displaying small molecule dependent stability. Such protein domains are called destabilizing domains (DDs). In the absence of its binding ligand, the DD is destabilizing and causes degradation of a payload fused to the DD (e.g., a protein of interest (POI), while in the presence of its binding ligand, the fused DD and payload can be stabilized, and its stability is dose dependent. These systems are further taught in co-owned U.S. Provisional Patent Application No. 62/320,864 filed Apr. 11, 2016, 62/466,596 filed Mar. 3, 2017 and the International Publication WO2017/180587 (the contents of each of which are herein incorporated by reference in their entirety).

[0018] In some embodiments, the present invention provides biocircuit systems, effector modules and compositions comprising the DDs of the present invention. In one aspect, the biocircuit system is a DD biocircuit system.

[0019] The present invention provides biocircuit systems which may comprise an effector module. The effector module may comprise a stimulus response element (SRE) and at least one payload. In some embodiments, the payload of the effector module may comprise a protein of interest which is attached, appended or associated with the SRE. In some embodiments, the SRE comprises a destabilizing domain. The destabilizing domain may comprise in whole or in part, a protein such as, but not limited to human dihydrofolate reductase (hDHFR), a hDHFR mutant and a DHFR variant. In one aspect, the DD may comprise, in whole or in part, a hDHFR mutant.

[0020] In some embodiments, the effector module of the biocircuit may be responsive to one or more stimuli.

[0021] In one aspect, the DHFR mutant may comprise one, two or three mutations relative to SEQ ID NO. 3106). The DHFR mutant may have mutations such as, but not limited to, M1del, V2A, C7R, I8V, V9A, A10T, A10V, Q13R, N14S, G16S, I17N, I17V, K19E, N20D, G21T, G21E, D22S, L23S, P24S, L28P, N30D, N30H, N30S, E31G, E31D, F32M, R33G, R33S, F35L, Q36R, Q36S, Q36K, Q36F, R37G, M38V, M38T, T40A, V44A, K47R, N49S, N49D, M53T, G54R, K56E, K56R, T57A, F59S, I61T, K64R, N65A, N65S, N65D, N65F, L68S, K69E, K69R, R71G, I72T, I72A, I72V, N73G, L74N, V75F, R78G, L80P, K81R, E82G, H88Y, F89L, R92G, S93G, S93R, L94A, D96G, A97T, L98S, K99G, K99R, L100P, E102G, Q103R, P104S, E105G, A107T, A107V, N108D, K109E, K109R, V110A, D111N, M112T, M112V, V113A, W114R, I115V, I115L, V116I, G117D, V121A, Y122C, Y122D, Y122I, K123R, K123E, A125F, M126I, N127R, N127S, N127Y, H128R, H128Y, H131R, L132P, K133E, L134P, F135P, F135L, F135S, F135V, V136M, T137R, R138G, R138I, I139T, I139V, M140I, M140V, Q141R, D142G, F143S, F143L, E144G, D146G, T147A, F148S, F148L, F149L, P150L, E151G, 1152V, D153A, D153G, E155G, K156R, Y157R, Y157C, K158E, K158R, L159P, L160P, E162G, Y163C, V166A, S168C, D169G, V170A, Q171R, E172G, E173G, E173A, K174R, I176A, I176F, I176T, K177E, K177R, Y178C, Y178H, F180L, E181G, V182A, Y183C, Y183H, E184R, E184G, K185R, K185del, K185E, N186S, N186D, D187G, and D187N.

[0022] In some embodiments, the DHFR mutant may comprise one or more mutations in an amino acid at the mutation site being identical to one or more vicinal amino acids. The vicinal amino acid may be selected from, but not limited to one, two, three, four, and five amino acids, upstream or downstream from the mutation.

[0023] In some embodiments, the DHFR mutant may be selected from, but not limited to hDHFR (A107V), comprising the amino acid sequence of SEQ ID NO. 3107); hDHFR (F59S), comprising the amino acid sequence of SEQ ID NO. 3108); hDHFR (I17V), comprising the amino acid sequence of SEQ ID NO. 3109); hDHFR (K185E), comprising the amino acid sequence of SEQ ID NO. 3110); hDHFR (K81R), comprising the amino acid sequence of SEQ ID NO. 3111); hDHFR (M140I), comprising the amino acid sequence of SEQ ID NO. 3112); hDHFR (N127Y), comprising the amino acid sequence of SEQ ID NO. 3113); hDHFR (N186D), comprising the amino acid sequence of SEQ ID NO. 3114); hDHFR (N65D), comprising the amino acid sequence of SEQ ID NO. 3115); hDHFR (Y122I), comprising the amino acid sequence of SEQ ID NO. 3116); hDHFR (A10V, H88Y), comprising the amino acid sequence of SEQ ID NO. 3117); hDHFR (Amino acid 2-187 of WT) (Y122I), comprising the amino acid sequence of SEQ ID NO. 3118); hDHFR (C7R, Y163C), comprising the amino acid sequence of SEQ ID NO. 3119); hDHFR (E162G, I176F), comprising the amino acid sequence of SEQ ID NO. 3120); hDHFR (G21T, Y122I), comprising the amino acid sequence of SEQ ID NO. 3121); hDHFR (H131R, E144G), comprising the amino acid sequence of SEQ ID NO. 3122); hDHFR (I17V, Y122I), comprising the amino acid sequence of SEQ ID NO. 3123); hDHFR (L74N, Y122I), comprising the amino acid sequence of SEQ ID NO. 3124); hDHFR (L94A, T147A), comprising the amino acid sequence of SEQ ID NO. 3125); hDHFR (M53T, R138I), comprising the amino acid sequence of SEQ ID NO. 3126); hDHFR (N127Y, Y122I), comprising the amino acid sequence of SEQ ID NO. 3127); hDHFR (Q36K, Y122I), comprising the amino acid sequence of SEQ ID NO. 3128); hDHFR (T137R, F143L), comprising the amino acid sequence of SEQ ID NO. 3129); hDHFR (T57A, I72A), comprising the amino acid sequence of SEQ ID NO. 3130); hDHFR (V121A, Y122I), comprising the amino acid sequence of SEQ ID NO. 3131); hDHFR (V75F, Y122I), comprising the amino acid sequence of SEQ ID NO. 3132); hDHFR (Y122I, A125F), comprising the amino acid sequence of SEQ ID NO. 3133); hDHFR (Y122I, M140I), comprising the amino acid sequence of SEQ ID NO. 3134); hDHFR (Y178H, E181G), comprising the amino acid sequence of SEQ ID NO. 3135); hDHFR (Y183H, K185E), comprising the amino acid sequence of SEQ ID NO. 3136); hDHFR (Amino acid 2-187 of WT) (G21T, Y122I), comprising the amino acid sequence of SEQ ID NO. 3137); hDHFR (Amino acid 2-187 of WT) (I17V, Y122I), comprising the amino acid sequence of SEQ ID NO. 3138); hDHFR (Amino acid 2-187 of WT) (L74N, Y122I), comprising the amino acid sequence of SEQ ID NO. 3139); hDHFR (Amino acid 2-187 of WT) (L94A, T147A), comprising the amino acid sequence of SEQ ID NO. 3140); hDHFR (Amino acid 2-187 of WT) (M53T, R138I), comprising the amino acid sequence of SEQ ID NO. 3141); hDHFR (Amino acid 2-187 of WT) (N127Y, Y122I), comprising the amino acid sequence of SEQ ID NO. 3142); hDHFR (Amino acid 2-187 of WT) (Q36K, Y122I), comprising the amino acid sequence of SEQ ID NO. 3143); hDHFR (Amino acid 2-187 of WT) (V121A, Y122I), comprising the amino acid sequence of SEQ ID NO. 3144); hDHFR (Amino acid 2-187 of WT) (V75F, Y122I), comprising the amino acid sequence of SEQ ID NO. 3145); hDHFR (Amino acid 2-187 of WT) (Y122I, A125F), comprising the amino acid sequence of SEQ ID NO. 3146); hDHFR (Amino acid 2-187 of WT) (Y122I, M140I), comprising the amino acid sequence of SEQ ID NO. 3147); hDHFR (E31D, F32M, V116I), comprising the amino acid sequence of SEQ ID NO. 3148); hDHFR (G21E, I72V, I176T), comprising the amino acid sequence of SEQ ID NO. 3149); hDHFR (I8V, K133E, Y163C), comprising the amino acid sequence of SEQ ID NO. 3150); hDHFR (K19E, F89L, E181G), comprising the amino acid sequence of SEQ ID NO. 3151); hDHFR (L23S, V121A, Y157C), comprising the amino acid sequence of SEQ ID NO. 3152); hDHFR (N49D, F59S, D153G), comprising the amino acid sequence of SEQ ID NO. 3153); hDHFR (Q36F, N65F, Y122I), comprising the amino acid sequence of SEQ ID NO. 3154); hDHFR (Q36F, Y122I, A125F), comprising the amino acid sequence of SEQ ID NO. 3155); hDHFR (V110A, V136M, K177R), comprising the amino acid sequence of SEQ ID NO. 3156); hDHFR (V9A, S93R, P150L), comprising the amino acid sequence of SEQ ID NO. 3157); hDHFR (Y122I, H131R, E144G), comprising the amino acid sequence of SEQ ID NO. 3158); hDHFR (G54R, I15L, M140V, S168C), comprising the amino acid sequence of SEQ ID NO. 3159); hDHFR (Amino acid 2-187 of WT) (E31D, F32M, V116I), comprising the amino acid sequence of SEQ ID NO. 3160); hDHFR (Amino acid 2-187 of WT) (Q36F, N65F, Y122I), comprising the amino acid sequence of SEQ ID NO. 3161); hDHFR (Amino acid 2-187 of WT) (Q36F, Y122I, A125F), comprising the amino acid sequence of SEQ ID NO. 3162); hDHFR (Amino acid 2-187 of WT) (Y122I, H131R, E144G), comprising the amino acid sequence of SEQ ID NO. 3163); hDHFR (V2A, R33G, Q36R, L100P, K185R), comprising the amino acid sequence of SEQ ID NO. 3164); hDHFR(D22S, F32M, R33S, Q36S, N65S), comprising the amino acid sequence of SEQ ID NO. 3165); hDHFR (Amino acid 2-187 of WT) (D22S, F32M, R33S, Q36S, N65S), comprising the amino acid sequence of SEQ ID NO. 3166); hDHFR (I17N, L98S, K99R, M112T, E151G, E162G, E172G), comprising the amino acid sequence of SEQ ID NO. 3167); hDHFR (G16S, I17V, F89L, D96G, K123E, M140V, D146G, K156R), comprising the amino acid sequence of SEQ ID NO. 3168); hDHFR (K81R, K99R, L100P, E102G, N108D, K123R, H128R, D142G, F180L, K185E), comprising the amino acid sequence of SEQ ID NO. 3169); hDHFR (R138G, D142G, F143S, K156R, K158E, E162G, V166A, K177E, Y178C, K185E, N186S), comprising the amino acid sequence of SEQ ID NO. 3170); hDHFR (N14S, P24S, F35L, M53T, K56E, R92G, S93G, N127S, H128Y, F135L, F143S, L159P, L160P, E173A, F180L), comprising the amino acid sequence of SEQ ID NO. 3171); hDHFR (F35L, R37G, N65A, L68S, K69E, R71G, L80P, K99G, G117D, L132P, I139V, M140I, D142G, D146G, E173G, D187G), comprising the amino acid sequence of SEQ ID NO. 3172); hDHFR (L28P, N30H, M38V, V44A, L68S, N73G, R78G, A97T, K99R, A107T, K109R, D111N, L134P, F135V, T147A, I152V, K158R, E172G, V182A, E184R), comprising the amino acid sequence of SEQ ID NO. 3173); hDHFR (V2A, I17V, N30D, E31G, Q36R, F59S, K69E, I72T, H88Y, F89L, N108D, K109E, V110A, I115V, Y122D, L132P, F135S, M140V, E144G, T147A, Y157C, V170A, K174R, N186S), comprising the amino acid sequence of SEQ ID NO. 3174); hDHFR (L100P, E102G, Q103R, P104S, E105G, N108D, V113A, W114R, Y122C, M126I, N127R, H128Y, L132P, F135P, I139T, F148S, F149L, I152V, D153A, D169G, V170A, I176A, K177R, V182A, K185R, N186S), comprising the amino acid sequence of SEQ ID NO. 3175); and hDHFR (A10T, Q13R, N14S, N20D, P24S, N30S, M38T, T40A, K47R, N49S, K56R, I61T, K64R, K69R, I72A, R78G, E82G, F89L, D96G, N108D, M112V, W114R, Y122D, K123E, I139V, Q141R, D142G, F148L, E151G, E155G, Y157R, Q171R, Y183C, E184G, K185del, D187N), comprising the amino acid sequence of SEQ ID NO. 3176).

[0024] In one aspect, the hDHFR mutant may be encoded by a nucleic acid sequence independently selected from, but not limited to, SEQ ID NOs. 3177-3191), 3192), 3193), 3194), 3195-3229), 3230), 3231), 3232), 3233), 3234), 3235), 3236), 3237), 3238), 3239), 3240), 3241), 3242), 3243), 3244), or 3245).

[0025] In some embodiments, the stimulus of biocircuit system may be Trimethoprim or Methotrexate. In one aspect, the hDHFR mutant may comprise one or more mutations in a region that interacts directly with the stimulus.

[0026] In one aspect, the effector module may comprise a hDHFR-derived SRE operably linked to a payload. In some embodiments, the hDHFR-derived SRE may be a hDHFR mutant that may comprise one, two, three or more mutations selected from, but not limited to, M1del, V2A, C7R, I8V, V9A, A10T, A10V, Q13R, N14S, G16S, I17N, I17V, K19E, N20D, G21T, G21E, D22S, L23S, P24S, L28P, N30D, N30H, N30S, E31G, E31D, F32M, R33G, R33S, F35L, Q36R, Q36S, Q36K, Q36F, R37G, M38V, M38T, T40A, V44A, K47R, N49S, N49D, M53T, G54R, K56E, K56R, T57A, F59S, I61T, K64R, N65A, N65S, N65D, N65F, L68S, K69E, K69R, R71G, I72T, I72A, I72V, N73G, L74N, V75F, R78G, L80P, K81R, E82G, H88Y, F89L, R92G, S93G, S93R, L94A, D96G, A97T, L98S, K99G, K99R, L100P, E102G, Q103R, P104S, E105G, A107T, A107V, N108D, K109E, K109R, V110A, D111N, M112T, M112V, V113A, W114R, I115V, I115L, V116I, G117D, V121A, Y122C, Y122D, Y122I, K123R, K123E, A125F, M126I, N127R, N127S, N127Y, H128R, H128Y, H131R, L132P, K133E, L134P, F135P, F135L, F135S, F135V, V136M, T137R, R138G, R138I, I139T, I139V, M140I, M140V, Q141R, D142G, F143S, F143L, E144G, D146G, T147A, F148S, F148L, F149L, P150L, E151G, 1152V, D153A, D153G, E155G, K156R, Y157R, Y157C, K158E, K158R, L159P, L160P, E162G, Y163C, V166A, S168C, D169G, V170A, Q171R, E172G, E173G, E173A, K174R, I176A, I176F, I176T, K177E, K177R, Y178C, Y178H, F180L, E181G, V182A, Y183C, Y183H, E184R, E184G, K185R, K185del, K185E, N186S, N186D, D187G, and D187N.

[0027] In one aspect, the effector module may comprise a hDHFR-derived SRE selected from, but not limited to hDHFR (A107V), comprising the amino acid sequence of SEQ ID NO. 3246); hDHFR (F59S), comprising the amino acid sequence of SEQ ID NO. 3247); hDHFR (I17V), comprising the amino acid sequence of SEQ ID NO. 3248); hDHFR (K185E), comprising the amino acid sequence of SEQ ID NO. 3249); hDHFR (K81R), comprising the amino acid sequence of SEQ ID NO. 3250); hDHFR (M140I), comprising the amino acid sequence of SEQ ID NO. 3251); hDHFR (N127Y), comprising the amino acid sequence of SEQ ID NO. 3252); hDHFR (N186D), comprising the amino acid sequence of SEQ ID NO. 3253); hDHFR (N65D), comprising the amino acid sequence of SEQ ID NO. 3254); hDHFR (Y122I), comprising the amino acid sequence of SEQ ID NO. 3255); hDHFR (A10V, H88Y), comprising the amino acid sequence of SEQ ID NO. 3256); hDHFR (Amino acid 2-187 of WT) (Y122I), comprising the amino acid sequence of SEQ ID NO. 3257); hDHFR (C7R, Y163C), comprising the amino acid sequence of SEQ ID NO. 3258); hDHFR (E162G, I176F), comprising the amino acid sequence of SEQ ID NO. 3259); hDHFR (G21T, Y122I), comprising the amino acid sequence of SEQ ID NO. 3260); hDHFR (H131R, E144G), comprising the amino acid sequence of SEQ ID NO. 3261); hDHFR (I17V, Y122I), comprising the amino acid sequence of SEQ ID NO. 3262; hDHFR (L74N, Y122I), comprising the amino acid sequence of SEQ ID NO. 3263; hDHFR (L94A, T147A), comprising the amino acid sequence of SEQ ID NO. 3264; hDHFR (M53T, R138I), comprising the amino acid sequence of SEQ ID NO. 3265; hDHFR (N127Y, Y122I), comprising the amino acid sequence of SEQ ID NO. 3266; hDHFR (Q36K, Y122I), comprising the amino acid sequence of SEQ ID NO. 3267; hDHFR (T137R, F143L), comprising the amino acid sequence of SEQ ID NO. 3268; hDHFR (T57A, I72A), comprising the amino acid sequence of SEQ ID NO. 3269; hDHFR (V121A, Y122I), comprising the amino acid sequence of SEQ ID NO. 3270; hDHFR (V75F, Y122I), comprising the amino acid sequence of SEQ ID NO. 3271; hDHFR (Y122I, A125F), comprising the amino acid sequence of SEQ ID NO. 3272; hDHFR (Y122I, M140I), comprising the amino acid sequence of SEQ ID NO. 3273; hDHFR (Y178H, E181G), comprising the amino acid sequence of SEQ ID NO. 3274; hDHFR (Y183H, K185E), comprising the amino acid sequence of SEQ ID NO. 3275; hDHFR (Amino acid 2-187 of WT) (G21T, Y122I), comprising the amino acid sequence of SEQ ID NO. 3276; hDHFR (Amino acid 2-187 of WT) (I17V, Y122I), comprising the amino acid sequence of SEQ ID NO. 3277; hDHFR (Amino acid 2-187 of WT) (L74N, Y122I), comprising the amino acid sequence of SEQ ID NO. 3278; hDHFR (Amino acid 2-187 of WT) (L94A, T147A), comprising the amino acid sequence of SEQ ID NO. 3279; hDHFR (Amino acid 2-187 of WT) (M53T, R138I), comprising the amino acid sequence of SEQ ID NO. 3280; hDHFR (Amino acid 2-187 of WT) (N127Y, Y122I), comprising the amino acid sequence of SEQ ID NO. 3281; hDHFR (Amino acid 2-187 of WT) (Q36K, Y122I), comprising the amino acid sequence of SEQ ID NO. 3282; hDHFR (Amino acid 2-187 of WT) (V121A, Y122I), comprising the amino acid sequence of SEQ ID NO. 3283; hDHFR (Amino acid 2-187 of WT) (V75F, Y122I), comprising the amino acid sequence of SEQ ID NO. 3284; hDHFR (Amino acid 2-187 of WT) (Y122I, A125F), comprising the amino acid sequence of SEQ ID NO. 3285; hDHFR (Amino acid 2-187 of WT) (Y122I, M140I), comprising the amino acid sequence of SEQ ID NO. 3286; hDHFR (E31D, F32M, V116I), comprising the amino acid sequence of SEQ ID NO. 3287; hDHFR (G21E, I72V, I176T), comprising the amino acid sequence of SEQ ID NO. 3288; hDHFR (I8V, K133E, Y163C), comprising the amino acid sequence of SEQ ID NO. 3289; hDHFR (K19E, F89L, E181G), comprising the amino acid sequence of SEQ ID NO. 3290; hDHFR (L23S, V121A, Y157C), comprising the amino acid sequence of SEQ ID NO. 3291; hDHFR (N49D, F59S, D153G), comprising the amino acid sequence of SEQ ID NO. 3292; hDHFR (Q36F, N65F, Y122I), comprising the amino acid sequence of SEQ ID NO. 3293; hDHFR (Q36F, Y122I, A125F), comprising the amino acid sequence of SEQ ID NO. 3294; hDHFR (V110A, V136M, K177R), comprising the amino acid sequence of SEQ ID NO. 3295; hDHFR (V9A, S93R, P150L), comprising the amino acid sequence of SEQ ID NO. 3296; hDHFR (Y122I, H131R, E144G), comprising the amino acid sequence of SEQ ID NO. 297; hDHFR (G54R, I115L, M140V, S168C), comprising the amino acid sequence of SEQ ID NO. 3298; hDHFR (Amino acid 2-187 of WT) (E31D, F32M, V116I), comprising the amino acid sequence of SEQ ID NO. 3299; hDHFR (Amino acid 2-187 of WT) (Q36F, N65F, Y122I), comprising the amino acid sequence of SEQ ID NO. 3300; hDHFR (Amino acid 2-187 of WT) (Q36F, Y122I, A125F), comprising the amino acid sequence of SEQ ID NO. 3301; hDHFR (Amino acid 2-187 of WT) (Y122I, H131R, E144G), comprising the amino acid sequence of SEQ ID NO. 3302; hDHFR (V2A, R33G, Q36R, L100P, K185R), comprising the amino acid sequence of SEQ ID NO. 3303; hDHFR(D22S, F32M, R33S, Q36S, N65S), comprising the amino acid sequence of SEQ ID NO. 3304; hDHFR (Amino acid 2-187 of WT) (D22S, F32M, R33S, Q36S, N65S), comprising the amino acid sequence of SEQ ID NO. 3305; hDHFR (I17N, L98S, K99R, M112T, E151G, E162G, E172G), comprising the amino acid sequence of SEQ ID NO. 3306; hDHFR (G16S, I17V, F89L, D96G, K123E, M140V, D146G, K156R), comprising the amino acid sequence of SEQ ID NO. 3307; hDHFR (K81R, K99R, L100P, E102G, N108D, K123R, H128R, D142G, F180L, K185E), comprising the amino acid sequence of SEQ ID NO. 3308; hDHFR (R138G, D142G, F143S, K156R, K158E, E162G, V166A, K177E, Y178C, K185E, N186S), comprising the amino acid sequence of SEQ ID NO. 3309; hDHFR (N14S, P24S, F35L, M53T, K56E, R92G, S93G, N127S, H128Y, F135L, F143S, L159P, L160P, E173A, F180L), comprising the amino acid sequence of SEQ ID NO. 3310; hDHFR (F35L, R37G, N65A, L68S, K69E, R71G, L80P, K99G, G117D, L132P, I139V, M140I, D142G, D146G, E173G, D187G), comprising the amino acid sequence of SEQ ID NO. 3311; hDHFR (L28P, N30H, M38V, V44A, L68S, N73G, R78G, A97T, K99R, A107T, K109R, D111N, L134P, F135V, T147A, I152V, K158R, E172G, V182A, E184R), comprising the amino acid sequence of SEQ ID NO. 3312; hDHFR (V2A, I17V, N30D, E31G, Q36R, F59S, K69E, I72T, H88Y, F89L, N108D, K109E, V110A, I115V, I115L, Y122D, L132P, F135S, M140V, E144G, T147A, Y157C, V170A, K174R, N186S), comprising the amino acid sequence of SEQ ID NO. 3313; hDHFR (L100P, E102G, Q103R, P104S, E105G, N108D, V113A, W114R, Y122C, M126I, N127R, H128Y, L132P, F135P, 1139T, F148S, F149L, 1152V, D153A, D169G, V170A, I176A, K177R, V182A, K185R, N186S), comprising the amino acid sequence of SEQ ID NO. 3314; and hDHFR (A10T, Q13R, N14S, N20D, P24S, N30S, M38T, T40A, K47R, N49S, K56R, I61T, K64R, K69R, I72A, R78G, E82G, F89L, D96G, N108D, M112V, W114R, Y122D, K123E, I139V, Q141R, D142G, F148L, E151G, E155G, Y157R, Q171R, Y183C, E184G, K185del, D187N), comprising the amino acid sequence of SEQ ID NO. 3315.

[0028] In some embodiments, the payload of the effector module may be selected from, but not limited to, a natural protein, a variant thereof, a fusion polypeptide, an antibody or a fragment thereof, a therapeutic agent or a gene therapy agent.

[0029] In one aspect, the effector module may further comprise a protein cleavage site. As a non-limiting example, the protein cleavage site may be a furin cleavage site or a modified furin cleavage site.

[0030] In some embodiments, the hDHFR-derived SRE of the effector module may exhibit both a destabilization ratio between 0 and 0.09 and a destabilizing mutation co-efficient between 0.09. The destabilization ratio may comprise the ratio of expression, function or level of the payload in the absence of the stimulus specific to the hDHFR-derived SRE to the expression, function or level of the payload that is expressed constitutively in the absence of the same stimulus. The destabilizing mutation co-efficient may comprise the ratio of expression, function or level of the payload when operably linked to the hDHFR-derived SRE, in the absence of the stimulus specific to the hDHFR-derived SRE; to the expression, function or level of the payload when operably linked to the wildtype protein from which the hDHFR-derived SRE is derived and in the absence of the same stimulus. In one aspect, the hDHFR-derived SRE of the effector module may stabilize the payload by a stabilization ratio of 1 or more. The stabilization ratio may be the ratio of expression, function or level of the payload in the presence of the stimulus to the expression, function or level of the payload in the absence of the stimulus.

[0031] In one aspect, the payload of the effector module may be a protein of interest.

[0032] The present invention also provides vectors which may comprise a nucleic acid independently selected from, but not limited to any of the sequences selected from SEQ ID NOs. 3316-3318, 3319-3338, 3339-3342, 3343-3345, 3346, 3347, 3348, 3349, 3350, 3351, 3352-3354, 3355-3358, 3359, or 3360-3365.

[0033] In some embodiments, the vector may be a viral vector. In some embodiments, the viral vector may be retroviral vector, a lentiviral vector, a rAAV vector, or an oncolytic viral vector.

[0034] The present invention also provides methods of tuning the expression level and/or activity of a protein of interest. The method of tuning described herein, may comprise appending or attaching a protein of interest to a hDHFR mutant. In some embodiments, the hDHFR mutant may comprise one, two, three or more mutations selected from M1del, V2A, C7R, I8V, V9A, A10T, A10V, Q13R, N14S, G16S, I17N, I17V, K19E, N20D, G21T, G21E, D22S, L23S, P24S, L28P, N30D, N30H, N30S, E31G, E31D, F32M, R33G, R33S, F35L, Q36R, Q36S, Q36K, Q36F, R37G, M38V, M38T, T40A, V44A, K47R, N49S, N49D, M53T, G54R, K56E, K56R, T57A, F59S, I61T, K64R, N65A, N65S, N65D, N65F, L68S, K69E, K69R, R71G, I72T, I72A, I72V, N73G, L74N, V75F, R78G, L80P, K81R, E82G, H88Y, F89L, R92G, S93G, S93R, L94A, D96G, A97T, L98S, K99G, K99R, L100P, E102G, Q103R, P104S, E105G, A107T, A107V, N108D, K109E, K109R, V110A, D111N, M112T, M112V, V113A, W114R, I115V, I115L, V116I, G117D, V121A, Y122C, Y122D, Y122I, K123R, K123E, A125F, M126I, N127R, N127S, N127Y, H128R, H128Y, H131R, L132P, K133E, L134P, F135P, F135L, F135S, F135V, V136M, T137R, R138G, R138I, I139T, I139V, M140I, M140V, Q141R, D142G, F143S, F143L, E144G, D146G, T147A, F148S, F148L, F149L, P150L, E151G, I152V, D153A, D153G, E155G, K156R, Y157R, Y157C, K158E, K158R, L159P, L160P, E162G, Y163C, V166A, S168C, D169G, V170A, Q171R, E172G, E173G, E173A, K174R, I176A, I176F, I176T, K177E, K177R, Y178C, Y178H, F180L, E181G, V182A, Y183C, Y183H, E184R, E184G, K185R, K185del, K185E, N186S, N186D, D187G, and D187N.

[0035] In one embodiment, the DDs of the present invention may be stabilized by ligands such as Trimethoprim and Methotrexate.

[0036] In some embodiments, the effector module of the present invention is a fusion construct comprising a DD of the invention operably linked to a payload. In one aspect, the payload may be any natural protein of interest (POI) or variants thereof, an antibody or fragments thereof, a therapeutic agent, or any artificial peptide or polypeptide.

[0037] In some embodiments, the biocircuit system of the present invention comprising a stimulus and an effector module of the invention. The DD of the effector module binds to the stimulus and regulates the stability of the linked payload. The DD may destabilize the protein of interest by a destabilization ratio between 0, and 0.09, wherein the destabilization ratio comprises the ratio of expression, function or level of a protein of interest in the absence of the stimulus specific to the DD to the expression, function or level of the protein of interest that is expressed constitutively, and in the absence of the stimulus specific to the DD. In some embodiments, the DD may stabilize the protein of interest by a stabilization ratio of 1 or more, wherein the stabilization ratio comprises the ratio of expression, function or level of a protein of interest in the presence of the stimulus to the expression, function or level of the protein of interest in the absence of the stimulus.

[0038] In some embodiments, the biocircuit system of the present invention comprising a stimulus and an effector module of the invention. The DD of the effector module binds to the stimulus and regulates the stability of the linked payload.

[0039] In some embodiments, polynucleotides encoding destabilizing domains, effector modules and biocircuit systems, are provided. The polynucleotides of the invention may be codon optimized. Vectors comprising polynucleotides of the invention are also provided. In some aspects, the vector may be a non-viral vector, or a viral vector.

[0040] Methods for tuning the expression level and activity of a protein of interest using the DDs, effector modules, biocircuit systems and compositions of the invention are also provided.

[0041] The present invention provides compositions and methods for immunotherapy. The compositions relate to tunable systems and agents that induce anti-cancer immune responses in a cell or in a subject. The tunable system and agent may be a biocircuit system comprising at least one effector module that is responsive to at least one stimulus. The biocircuit system may be, but is not limited to, a destabilizing domain (DD) biocircuit system, a dimerization biocircuit system, a receptor biocircuit system, and a cell biocircuit system. These systems are further taught in co-owned U.S. Provisional Patent Application No. 62/320,864 filed Apr. 11, 2016, 62/466,596 filed Mar. 3, 2017 and the International Publication WO2017/180587 (the contents of each of which are herein incorporated by reference in their entirety).

[0042] In some embodiments, the composition for inducing an immune response may comprise an effector module. In some embodiments, the effector module may comprise a stimulus response element (SRE) operably linked to at least one payload. In one aspect, the payload may be an immunotherapeutic agent.

[0043] In some embodiments, the immunotherapeutic agent may be selected from, but is not limited to a chimeric antigen receptor (CAR) and an antibody.

[0044] In one aspect, the SRE of the composition may be responsive to or interact with at least one stimulus.

[0045] In some embodiments, the SRE may comprise a destabilizing domain (DD). The DD may be derived from a parent protein or from a mutant protein having one, two, there, or more amino acid mutations compared to the parent protein. In some embodiments, the parent protein may be selected from, but is not limited to, human protein FKBP, comprising the amino acid sequence of SEQ ID NO. 3366; human DHFR (hDHFR), comprising the amino acid sequence of SEQ ID NO. 3367; E. coli DHFR, comprising the amino acid sequence of SEQ ID NO. 3368; PDE5, comprising the amino acid sequence of SEQ ID NO. 3369; PPAR, gamma comprising the amino acid sequence of SEQ ID NO. 3370; CA2, comprising the amino acid sequence of SEQ ID NO. 3371; or NQO2, comprising the amino acid sequence of SEQ ID NO. 3372.

[0046] In one aspect, the parent protein is hDHFR and the DD comprises a mutant protein. The mutant protein may comprise a single mutation and may be selected from, but not limited to hDHFR (I17V), hDHFR (F59S), hDHFR (N65D), hDHFR (K81R), hDHFR (A107V), hDHFR (Y122I), hDHFR (N127Y), hDHFR (M140I), hDHFR (K185E), hDHFR (N186D), and hDHTFR (M140I), hDHFR (Amino acid 2-187 of WT; N127Y), hDHFR (Amino acid 2-187 of WT; I17V), hDHFR (Amino acid 2-187 of WT; Y122I), and hDHFR (Amino acid 2-187 of WT; K185E). In some embodiments, the mutant protein may comprise two mutations and may be selected from, but not limited to, hDHFR (C7R, Y163C), hDHFR (A10V, H88Y), hDHFR (Q36K, Y122I), hDHFR (M53T, R138I), hDHFR (T57A, I72A), hDHFR (E63G, I176F), hDHFR (G21T, Y122I), hDHFR (L74N, Y122I), hDHFR (V75F, Y122I), hDHFR (L94A, T147A), DHFR (V121A, Y22I), hDHFR (Y122I, A125F), hDHFR (H131R, E144G), hDHFR (T137R, F143L), hDHFR (Y178H, E18IG), and hDHFR (Y183H, K185E), hDHFR (E162G, I176F) hDHFR (Amino acid 2-187 of WT; I17V, Y122I), hDHFR (Amino acid 2-187 of WT; Y122I, M140I), hDHFR (Amino acid 2-187 of WT; N127Y, Y122I), hDHFR (Amino acid 2-187 of WT; E162G, I176F), and hDHFR (Amino acid 2-187 of WT; H131R, E144G), and hDHFR (Amino acid 2-187 of WT; Y122I, A125F). In some embodiments, the mutant may comprise three mutations and the mutant may be selected from hDHFR (V9A, S93R, P150L), hDHFR (I8V, K133E, Y163C), hDHFR (L23S, V121A, Y157C), hDHFR (K19E, F89L, E181G), hDHFR (Q36F, N65F, Y122I), hDHFR (G54R, M140V, S168C), hDHFR (V110A, V136M, K177R), hDHFR (Q36F, Y122I, A125F), hDHFR (N49D, F59S, D153G), and hDHFR (G21E, I72V, I176T), hDHFR (Amino acid 2-187 of WT; Q36F, Y122I, A125F), hDHFR (Amino acid 2-187 of WT; Y122I, H131R, E144G), hDHFR (Amino acid 2-187 of WT; E31D, F32M, V116I), and hDHFR (Amino acid 2-187 of WT; Q36F, N65F, Y122I). In some embodiments, the mutant may comprise four or more mutations and the mutant may be selected from hDHFR (V2A, R33G, Q36R, L100P, K185R), hDHFR (Amino acid 2-187 of WT; D22S, F32M, R33S, Q36S, N65S), hDHFR (I17N, L98S, K99R, M112T, E151G, E162G, E172G), hDHFR (G16S, I17V, F89L, D96G, K123E, M140V, D146G, K156R), hDHFR (K81R, K99R, L100P, E102G, N108D, K123R, H128R, D142G, F180L, K185E), hDHFR (R138G, D142G, F143S, K156R, K158E, E162G, V166A, K177E, Y178C, K185E, N186S), hDHFR (N14S, P24S, F35L, M53T, K56E, R92G, S93G, N127S, H128Y, F135L, F143S, L159P, L160P, E173A, F180L), hDHFR (F35L, R37G, N65A, L68S, K69E, R71G, L80P, K99G, G117D, L132P, I139V, M140I, D142G, D146G, E173G, D187G), hDHFR (L28P, N30H, M38V, V44A, L68S, N73G, R78G, A97T, K99R, A107T, K109R, D111N, L134P, F135V, T147A, 1152V, K158R, E172G, V182A, E184R), hDHFR (V2A, 117V, N30D, E31G, Q36R, F59S, K69E, I72T, H88Y, F89L, N108D, K109E, V110A, I115V, Y122D, L132P, F135S, M140V, E144G, T147A, Y157C, V170A, K174R, N186S), hDHFR (L100P, E102G, Q103R, P104S, E105G, N108D, V113A, W114R, Y122C, M126I, N127R, H128Y, L132P, F135P, 1139T, F148S, F149L, 1152V, D153A, D169G, V170A, I176A, K177R, V182A, K185R, N186S), and hDHFR (A10T, Q13R, N14S, N20D, P24S, N30S, M38T, T40A, K47R, N49S, K56R, I61T, K64R, K69R, I72A, R78G, E82G, F89L, D96G, N108D, M112V, W114R, Y122D, K123E, I139V, Q141R, D142G, F148L, E151G, E155G, Y157R, Q171R, Y183C, E184G, K185del, D187N).

[0047] In one aspect, the stimulus of the SRE may be Trimethoprim or Methotrexate.

[0048] In some embodiments, the immunotherapeutic agent of the effector module is a chimeric antigen receptor (CAR). The chimeric antigen may comprise an extracellular target moiety; a transmembrane domain; an intracellular signaling domain; and optionally, one or more co-stimulatory domains.

[0049] In one aspect, the CAR may be selected from, but is not limited to a standard CAR, a split CAR, an off-switch CAR, an on-switch CAR, a first-generation CAR, a second-generation CAR, a third-generation CAR, or a fourth-generation CAR.

[0050] In some embodiments, the extracellular target moiety of the CAR may be selected from, but is not limited to an Ig NAR, a Fab fragment, a Fab′ fragment, a F(ab)′2 fragment, a F(ab)′3 fragment, an Fv, a single chain variable fragment (scFv), a bis-scFv, a (scFv)2, a minibody, a diabody, a triabody, a tetrabody, an intrabody, a disulfide stabilized Fv protein (dsFv), a unibody, a nanobody, and an antigen binding region derived from an antibody that may specifically bind to any of a protein of interest, a ligand, a receptor, a receptor fragment or a peptide aptamer.

[0051] In one aspect, the extracellular target moiety may be an scFv derived from an antibody. In one aspect, the scFv may specifically bind to a CD19 antigen

[0052] In one aspect, the scFv of the CAR may be a CD19 scFv. In some embodiments, the CD19 scFv may comprise a heavy chain variable region having an amino acid sequence independently selected from the group consisting of SEQ ID NO: 3373-3404, and a light chain variable region having an amino acid sequence independently selected from the group consisting of any of SEQ ID NOs: 3405-3446. In some embodiments, the CD19 scFv may comprise an amino acid sequence selected from the group consisting of any of SEQ ID NOs: 3447-3591, and 3592.

[0053] In some embodiments, the intracellular signaling domain of the CAR may be a signaling domain derived from T cell receptor CD3zeta. In some embodiments, the intracellular signaling domain may be selected from a cell surface molecule selected from the group consisting of FcR gamma, FcR beta, CD3 gamma, CD3 delta, CD3 epsilon, CD5, CD22, CD79a, CD79b, and CD66d. In one aspect, the CAR may include a co-stimulatory domain. In some embodiments, the co-stimulatory domain may be selected from the group consisting of 2B4, HVEM, ICOS, LAG3, DAP10, DAP12, CD27, CD28, 4-1BB (CD137), OX40 (CD134), CD30, CD40, ICOS (CD278), glucocorticoid-induced tumor necrosis factor receptor (GITR), lymphocyte function-associated antigen-1 (LFA-1), CD2, CD7, LIGHT, NKG2C, and B7-H3.

[0054] (b) the co-stimulatory domain is present and is selected from the group consisting of 2B4, HVEM, ICOS, LAG3, DAP10, DAP12, CD27, CD28, 4-1BB (CD137), OX40 (CD134), CD30, CD40, ICOS (CD278), glucocorticoid-induced tumor necrosis factor receptor (GITR), lymphocyte function-associated antigen-1 (LFA-1), CD2, CD7, LIGHT, NKG2C, and B7-H3.

[0055] In some embodiments, the intracellular signaling domain of the CAR may be a T cell receptor CD3zeta signaling domain, which may comprise the amino acid sequence of SEQ ID NO: 3593.

[0056] In some embodiments, T cell receptor CD3zeta signaling domain of the CAR, comprising the amino acid sequence of SEQ ID NO: 3594, may further comprise at least one co-stimulatory domain. The co-stimulatory domain may comprise an amino acid sequence of SEQ ID NOs: 421-422, 424-527. And 2739.

[0057] In one embodiment, the transmembrane domain of the CAR may be derived from a transmembrane region of an alpha, beta or zeta chain of a T-cell receptor. In one aspect, the transmembrane domain may be derived from the CD3 epsilon chain of a T-cell receptor. In one embodiment, the transmembrane domain may be derived from a molecule selected from CD4, CD5, CD8, CD8α, CD9, CD16, CD22, CD33, CD28, CD37, CD45, CD64, CD80, CD86, CD148, DAP 10, EpoRI, GITR, LAG3, ICOS, Her2, OX40 (CD134), 4-1BB (CD137), CD152, CD154, PD-1, or CTLA-4. In another embodiment, the transmembrane domain may be derived from an immunoglobulin selected from IgG1, IgD, IgG4, and an IgG4 Fc region. In one aspect, the transmembrane domain may comprise an amino acid sequence selected from the group consisting of any of SEQ ID NOs: 3595-3645, and 3646-3656.

[0058] In some embodiments, the CAR of the effector module may further comprise a hinge region near the transmembrane domain. In one aspect, the hinge region may comprise an amino acid sequence selected from the group consisting of any of SEQ ID NOs: 590-633, 635-668, and 2741.

[0059] In some embodiments, the immunotherapeutic agent may be an antibody that is specifically immunoreactive to an antigen selected from a tumor specific antigen (TSA), a tumor associated antigen (TAA), or an antigenic epitope.

[0060] In one aspect, the antigen may be an antigenic epitope. In some embodiments, the antigenic epitope may be CD19.

[0061] In some embodiments, the antibody may comprise a heavy chain variable region having an amino acid sequence independently selected from the group consisting of any of SEQ ID NOs: 3657-3688 and a light chain variable region having an amino acid sequence independently selected from the group consisting of any of SEQ ID NOs: 3689-3730. In one aspect, the antibody may comprise an amino acid sequence selected from the group consisting of any of SEQ ID NOs: 3731-3875, and 3876.

[0062] In one aspect, the first effector module may comprise the amino acid sequence of any of SEQ ID NO: 3877-3891, 3892-3897, 3898-3901, and 3902-3918.

[0063] In some embodiments, the first SRE of the effector module may stabilize the immunotherapeutic agent by a stabilization ratio of 1 or more, wherein the stabilization ratio may comprise the ratio of expression, function or level of the immunotherapeutic agent in the presence of the stimulus to the expression, function or level of the immunotherapeutic agent in the absence of the stimulus.

[0064] In some embodiments, the SRE may destabilize the immunotherapeutic agent by a destabilization ratio between 0, and 0.09, wherein the destabilization ratio may comprise the ratio of expression, function or level of the immunotherapeutic agent in the absence of the stimulus specific to the SRE to the expression, function or level of the immunotherapeutic agent that is expressed constitutively, and in the absence of the stimulus specific to the SRE.

[0065] The present invention also provides polynucleotides comprising the compositions of the invention.

[0066] In one aspect, the polynucleotides may be a DNA or RNA molecule. In one aspect, the polynucleotides may comprise spatiotemporally selected codons. In one aspect, the polynucleotides of the invention may be a DNA molecule. In some embodiments, the polynucleotides may be an RNA molecule. In one aspect, the RNA molecule may be a messenger molecule. In some embodiments, the RNA molecule may be chemically modified.

[0067] In some embodiments, the polynucleotides may further comprise, at least one additional feature selected from, but not limited to, a promoter, a linker, a signal peptide, a tag, a cleavage site and a targeting peptide.

[0068] The present invention also provides vectors comprising polynucleotides described herein. In one aspect, the vector may be a viral vector. In some embodiments, the viral vector may be a retroviral vector, a lentiviral vector, a gamma retroviral vector, a recombinant AAV vector, an adeno viral vector, and an oncolytic viral vector.

[0069] The present invention also provides immune cells for adoptive cell transfer (ACT) which may express the compositions of the invention, the polynucleotides described herein. In one aspect, the immune cells may be infected or transfected with the vectors described herein. The immune cells for ACT may be selected from, but not limited to a CD8+ T cell, a CD4+ T cell, a helper T cell, a natural killer (NK) cell, a NKT cell, a cytotoxic T lymphocyte (CTL), a tumor infiltrating lymphocyte (TIL), a memory T cell, a regulatory T (Treg) cell, a cytokine-induced killer (CIK) cell, a dendritic cell, a human embryonic stem cell, a mesenchymal stem cell, a hematopoietic stem cell, or a mixture thereof.

[0070] In some embodiments, the immune cells may be autologous, allogeneic, syngeneic, or xenogeneic in relation to a particular individual subject.

[0071] In some embodiments, the immune cell may further express a composition comprising a second effector module, said second effector module comprising a second SRE linked to a second immunotherapeutic agent. In one aspect, the second immunotherapeutic agent may be selected from a cytokine, and a cytokine-cytokine receptor fusion.

[0072] In one aspect, the second immunotherapeutic agent may be a cytokine. In one aspect, the cytokine may be IL12 or IL15.

[0073] In one aspect, the second immunotherapeutic agent may be a cytokine-cytokine receptor fusion polypeptide.

[0074] In some embodiments, the cytokine-cytokine receptor fusion polypeptide may be selected from, but is not limited to a IL12-IL12 receptor fusion polypeptide, a IL15-IL15 receptor fusion polypeptide, and a IL15-IL15 receptor sushi domain fusion polypeptide.

[0075] The present invention provides methods for reducing a tumor volume or burden in a subject comprising contacting the subject with the immune cells of the invention. Also provided herein, is a method for inducing an anti-tumor immune response in a subject, comprising administering the immune cells of the system to the subject.

[0076] The present invention also provides methods for enhancing the expansion and/or survival of immune cells, comprising contacting the immune cells with the compositions of the invention, the polynucleotides of the invention, and/or the vectors of the invention.

[0077] Also provided herein, is a method for inducing an immune response in a subject, administering the compositions of the invention, the polynucleotides of the invention, and/or the immune cells of the invention to the subject.

[0078] The present invention also provides a method of identifying a domain of a CD19 antigen which will not bind the FMC63 antibody (FMC63-distinct CD19 binding domain). The method may comprise (a) preparing a composition comprising a CD19 antigen, (b) contacting the composition in (a) with saturating levels of FMC63 antibody, (c) contacting the composition of step (b) with one or more selected members of a library of potential CD19 binders; and (d) identifying a binding domain on the CD19 antigen based on the differential binding of the selected members of the library of CD19 binders compared to the binding of FMC63. In some embodiments, the binding domains of the library may be generated using phage display techniques with the CD19 antigen as the seed sequence. In one aspect, the binding domain may be selected from a Fab fragment, a Fab′ fragment, a F(ab)′2 fragment, a F(ab)′3 fragment, Fv, a single chain variable fragment (scFv), a bis-scFv, a (scFv)2, a minibody, a diabody, a triabody, a tetrabody, a disulfide stabilized Fv protein (dsFv), a unibody, a nanobody, or an antigen binding region of an antibody, and an antibody fragment. In one aspect, the CD19 antigen may be selected from a whole or a portion of a human CD19 antigen, and a whole or a portion of a Rhesus CD19 antigen.

[0079] The present invention also provides chimeric antigen receptors that may comprise the FMC63-distinct CD19 binding domain obtained according to the methods described herein. Also, provided herein is a stimulus response element (SRE) operably linked to the chimeric antigen receptors that include the FMC63-distinct CD19 binding domain.

[0080] In some embodiments, the effector module comprises a stimulus response element (SRE) and at least one payload comprising a protein of interest (POI).

[0081] In some embodiments, the SRE may be a destabilizing domain (DD). In some examples, the DD is a mutant domain derived from a protein such as FKBP (FK506 binding protein), E. coli DHFR (Dihydrofolate reductase) (ecDHFR), human DHFR (hDHFR), or any protein of interest. In this context, the biocircuit system is a DD biocircuit system.

[0082] The payload may be any immunotherapeutic agent used for cancer immunotherapy such as a chimeric agent receptor (CAR) such as CD19 CAR that targets any molecule of tumor cells, an antibody, an antigen binding domain or combination of antigen binding domains, a cytokine such as IL12, IL15 or IL15/IL15Ra fusion, or any agent that can induce an immune response. The SRE and payload may be operably linked through one or more linkers and the positions of components may vary within the effector module.

[0083] In some embodiments, the effector module may further comprise of one or more additional features such as linker sequences (with specific sequences and lengths), cleavage sites, regulatory elements (that regulate expression of the protein of interest such as microRNA targeting sites), signal sequences that lead the effector module to a specific cellular or subcellular location, penetrating sequences, or tags and biomarkers for tracking the effector module.

[0084] In some embodiments, the DD may stabilize the immunotherapeutic agent with a stabilization ratio of at least one in the presence of the stimulus. According to the present invention, the DD may destabilize the immunotherapeutic agent in the absence of ligand with a destabilization ratio between 0, and 0.99.

[0085] The invention provides isolated biocircuit polypeptides, effector modules, stimulus response elements (SREs) and payloads, as well as polynucleotides encoding any of the foregoing; vectors comprising polynucleotides of the invention; and cells expressing polypeptides, polynucleotides and vectors of the invention. The polypeptides, polynucleotides, viral vectors and cells are useful for inducing anti-tumor immune responses in a subject.

[0086] In some embodiments, the vector of the invention is a viral vector. The viral vector may include, but is not limited to a retroviral vector, an adenoviral vector, an adeno-associated viral vector, or a lentiviral vector.

[0087] In some embodiments, the vector of the invention may be a non-viral vector, such as a nanoparticles and liposomes.

[0088] The present invention also provides immune cells engineered to include one or more polypeptides, polynucleotides, or vectors of the present invention. The cells may be immune effector cells, including T cells such as cytotoxic T cells, helper T cells, memory T cells, regulatory T cells, natural killer (NK) cells, NK T cells, cytokine-induced killer (CIK) cells, cytotoxic T lymphocytes (CTLs), and tumor infiltrating lymphocytes (TILs). The engineered cell may be used for adoptive cell transfer for treating a disease (e.g., a cancer).

[0089] The present invention also provides methods for inducing immune responses in a subject using the compositions of the invention. Also provided are methods for reducing a tumor burden in a subject using the compositions of the invention.

[0090] Also provided herein are methods for identifying FMC63-distinct binding domains and using CD19 antigens in which the FMC63 binding epitope is masked or absent. In some embodiments, the FMC63 binding domain may be included in the payloads and effector modules of the invention.

[0091] The present invention provides compositions and methods for immunotherapy. The compositions relate to tunable systems and agents that induce an immune response in a cell or in a subject. The tunable system and agent may be a biocircuit system comprising at least one effector module that is responsive to at least one stimulus. The biocircuit system may be, but is not limited to, a destabilizing domain (DD) biocircuit system, a dimerization biocircuit system, a receptor biocircuit system, and a cell biocircuit system. These systems are further taught in co-owned U.S. Provisional Patent Application No. 62/320,864 filed Apr. 11, 2016, 62/466,596 filed Mar. 3, 2017 and the International Publication WO2017/180587 (the contents of each of which are herein incorporated by reference in their entirety).

[0092] In some embodiments, the composition for inducing an immune response may comprise an effector module. In some embodiments, the effector module may comprise a stimulus response element (SRE) operably linked to at least one payload. In one aspect, the payload may be an immunotherapeutic agent.

[0093] In some embodiments, the immunotherapeutic agent may be selected from, but not limited to a cytokine, a cytokine receptor, a cytokine-cytokine receptor fusion, and any combinations thereof.

[0094] In one aspect, the SRE of the composition may be responsive to or interact with at least one stimulus.

[0095] In some embodiments, the SRE may comprise a destabilizing domain (DD). The DD may be derived from a parent protein or from a mutant protein having one, two, there, or more amino acid mutations compared to the parent protein. In some embodiments, the parent protein may be selected from, but is not limited to, human protein FKBP, comprising the amino acid sequence of SEQ. ID NO. 3919; human DHFR (hDHFR), comprising the amino acid sequence of SEQ. ID NO. 3920; E. coli DHFR, comprising the amino acid sequence of SEQ. ID NO. 3921; PDE5, comprising the amino acid sequence of SEQ. ID NO. 3922; PPAR, gamma comprising the amino acid sequence of SEQ. ID NO. 3923; CA2, comprising the amino acid sequence of SEQ. ID NO. 3924; or NQO2, comprising the amino acid sequence of SEQ. ID NO. 3925.

[0096] In one aspect, the parent protein is hDHFR and the DD comprises a mutant protein. The mutant protein may comprise a single mutation and may be selected from, but not limited to hDHFR (I17V), hDHFR (F59S), hDHFR (N65D), hDHFR (K81R), hDHFR (A107V), hDHFR (Y122I), hDHFR (N127Y), hDHFR (M140I), hDHFR (K185E), hDHFR (N186D), and hDHTFR (M140I), hDHFR (Amino acid 2-187 of WT; N127Y), hDHFR (Amino acid 2-187 of WT; I17V), hDHFR (Amino acid 2-187 of WT; Y122I), and hDHFR (Amino acid 2-187 of WT; K185E). In some embodiments, the mutant protein may comprise two mutations and may be selected from, but not limited to, hDHFR (C7R, Y163C), hDHFR (A10V, H88Y), hDHFR (Q36K, Y122I), hDHFR (M53T, R138I), hDHFR (T57A, I72A), hDHFR (E63G, I176F), hDHFR (G21T, Y122I), hDHFR (L74N, Y122I), hDHFR (V75F, Y122I), hDHFR (L94A, T147A), DHFR (V121A, Y22I), hDHFR (Y122I, A125F), hDHFR (H131R, E144G), hDHFR (T137R, F143L), hDHFR (Y178H, E18IG), and hDHFR (Y183H, K185E), hDHFR (E162G, I176F) hDHFR (Amino acid 2-187 of WT; I17V, Y122I), hDHFR (Amino acid 2-187 of WT; Y122I, M140I), hDHFR (Amino acid 2-187 of WT; N127Y, Y122I), hDHFR (Amino acid 2-187 of WT; E162G, I176F), and hDHFR (Amino acid 2-187 of WT; H131R, E144G), and hDHFR (Amino acid 2-187 of WT; Y122I, A125F). In some embodiments, the mutant may comprise three mutations and the mutant may be selected from hDHFR (V9A, S93R, P150L), hDHFR (I8V, K133E, Y163C), hDHFR (L23S, V121A, Y157C), hDHFR (K19E, F89L, E181G), hDHFR (Q36F, N65F, Y122I), hDHFR (G54R, M140V, S168C), hDHFR (V110A, V136M, K177R), hDHFR (Q36F, Y122I, A125F), hDHFR (N49D, F59S, D153G), and hDHFR (G21E, I72V, I176T), hDHFR (Amino acid 2-187 of WT; Q36F, Y122I, A125F), hDHFR (Amino acid 2-187 of WT; Y122I, H131R, E144G), hDHFR (Amino acid 2-187 of WT; E31D, F32M, V116I), and hDHFR (Amino acid 2-187 of WT; Q36F, N65F, Y122I). In some embodiments, the mutant may comprise four or more mutations and the mutant may be selected from hDHFR (V2A, R33G, Q36R, L100P, K185R), hDHFR (Amino acid 2-187 of WT; D22S, F32M, R33S, Q36S, N65S), hDHFR (I17N, L98S, K99R, M112T, E151G, E162G, E172G), hDHFR (G16S, I17V, F89L, D96G, K123E, M140V, D146G, K156R), hDHFR (K81R, K99R, L100P, E102G, N108D, K123R, H128R, D142G, F180L, K185E), hDHFR (R138G, D142G, F143S, K156R, K158E, E162G, V166A, K177E, Y178C, K185E, N186S), hDHFR (N14S, P24S, F35L, M53T, K56E, R92G, S93G, N127S, H128Y, F135L, F143S, L159P, L160P, E173A, F180L), hDHFR (F35L, R37G, N65A, L68S, K69E, R71G, L80P, K99G, G117D, L132P, I139V, M140I, D142G, D146G, E173G, D187G), hDHFR (L28P, N30H, M38V, V44A, L68S, N73G, R78G, A97T, K99R, A107T, K109R, D111N, L134P, F135V, T147A, I152V, K158R, E172G, V182A, E184R), hDHFR (V2A, I17V, N30D, E31G, Q36R, F59S, K69E, I72T, H88Y, F89L, N108D, K109E, V110A, I115V, Y122D, L132P, F135S, M140V, E144G, T147A, Y157C, V170A, K174R, N186S), hDHFR (L100P, E102G, Q103R, P104S, E105G, N108D, V113A, W114R, Y122C, M126I, N127R, H128Y, L132P, F135P, I139T, F148S, F149L, I152V, D153A, D169G, V170A, I176A, K177R, V182A, K185R, N186S), and hDHFR (A10T, Q13R, N14S, N20D, P24S, N30S, M38T, T40A, K47R, N49S, K56R, I61T, K64R, K69R, I72A, R78G, E82G, F89L, D96G, N108D, M112V, W114R, Y122D, K123E, I139V, Q141R, D142G, F148L, E151G, E155G, Y157R, Q171R, Y183C, E184G, K185del, D187N).

[0097] In one aspect, the stimulus of the SRE may be Trimethoprim or Methotrexate.

[0098] In some embodiments, the immunotherapeutic agent of the composition may be a cytokine. The cytokine may be an interleukin, an interferon, a tumor necrosis factor, a transforming growth factor B, a CC chemokine, a CXC chemokine, a CX3C chemokine or a growth factor.

[0099] In one aspect, the interleukin may be a whole or a portion of a IL15 and may comprise the amino acid sequence of SEQ ID NO. 3926. In one aspect, the IL15 may be modified. In some embodiments, the modifications may comprise fusing SEQ ID NO. 3926 to the whole or a portion of, a transmembrane domain. The IL15 may optionally be modified by incorporating a hinge domain.

[0100] In one aspect, the immunotherapeutic agent may be a cytokine-cytokine receptor fusion polypeptide. In some embodiments, the cytokine-cytokine receptor fusion polypeptide may comprise the whole or a portion of SEQ. ID NO. 3926, fused to the whole or a portion of any of SEQ. ID NOs. 3927-3934 to produce a IL15-IL15 receptor fusion polypeptide.

[0101] In some embodiments, the cytokine-cytokine receptor fusion polypeptide may be modified. The modification may comprise fusing the IL15-IL15 receptor fusion polypeptide to the whole, or a portion, of a transmembrane protein. In one aspect, an optional hinge domain may be incorporated.

[0102] In one aspect, the SRE of the composition may stabilize the immunotherapeutic agent by a stabilization ratio of 1 or more. The stabilization ratio may comprise the ratio of expression, function or level of the immunotherapeutic agent in the presence of the stimulus to the expression, function or level of the immunotherapeutic agent in the absence of the stimulus.

[0103] In one aspect, the SRE of the composition may destabilize the immunotherapeutic agent by a destabilization ratio between 0, and 0.09. The destabilization ratio may comprise the ratio of expression, function or level of an immunotherapeutic agent in the absence of the stimulus specific to the SRE to the expression, function or level of the immunotherapeutic agent that is expressed constitutively, and in the absence of the stimulus specific to the SRE.

[0104] The present invention also provides polynucleotides comprising the compositions of the invention.

[0105] In one aspect, the polynucleotides may be a DNA or RNA molecule. In one aspect, the polynucleotides may comprise spatiotemporally selected codons. In one aspect, the polynucleotides of the invention may be a DNA molecule. In some embodiments, the polynucleotides may be an RNA molecule. In one aspect, the RNA molecule may be a messenger molecule. In some embodiments, the RNA molecule may be chemically modified.

[0106] In some embodiments, the polynucleotides may further comprise, at least one additional feature selected from, but not limited to, a promoter, a linker, a signal peptide, a tag, a cleavage site and a targeting peptide.

[0107] The present invention also provides vectors comprising polynucleotides described herein. In one aspect, the vector may be a viral vector. In some embodiments, the viral vector may be a retroviral vector, a lentiviral vector, a gamma retroviral vector, a recombinant AAV vector, an adeno viral vector, and an oncolytic viral vector.

[0108] The present invention also provides immune cells for adoptive cell transfer (ACT) which may express the compositions of the invention, the polynucleotides described herein. In one aspect, the immune cells may be infected or transfected with the vectors described herein. The immune cells for ACT may be selected from, but not limited to a CD8+ T cell, a CD4+ T cell, a helper T cell, a natural killer (NK) cell, a NKT cell, a cytotoxic T lymphocyte (CTL), a tumor infiltrating lymphocyte (TIL), a memory T cell, a regulatory T (Treg) cell, a cytokine-induced killer (CIK) cell, a dendritic cell, a human embryonic stem cell, a mesenchymal stem cell, a hematopoietic stem cell, or a mixture thereof.

[0109] In some embodiments, the immune cells may be autologous, allogeneic, syngeneic, or xenogeneic in relation to a particular individual subject.

[0110] The present invention provides methods for reducing a tumor volume or burden in a subject comprising contacting the subject with the immune cells of the invention. Also provided herein, is a method for inducing an anti-tumor immune response in a subject, comprising administering the immune cells of the system to the subject.

[0111] The present invention also provides methods for enhancing the expansion and/or survival of immune cells, comprising contacting the immune cells with the compositions of the invention, the polynucleotides of the invention, and/or the vectors of the invention.

[0112] Also provided herein, is a method for inducing an immune response in a subject, administering the compositions of the invention, the polynucleotides of the invention, and/or the immune cells of the invention to the subject.

[0113] In some embodiments, the effector module comprises a stimulus response element (SRE) and at least one payload comprising a payload of interest (POI).

[0114] In some embodiments, the SRE may be a destabilizing domain (DD). In some examples, the DD is a domain derived from a protein such as FKBP (FK506 binding protein), E. coli DHFR (Dihydrofolate reductase) (ecDHFR), human DHFR (hDHFR), or any payload of interest. In this context, the biocircuit system is a DD biocircuit system.

[0115] The payload may be an immunotherapeutic agent used for cancer immunotherapy such as a cytokine such as IL15 or a cytokine-cytokine receptor polypeptides such as IL15/IL15Ra fusion polypeptide, or any agent that can induce an immune response. The SRE and payload may be operably linked through one or more linkers and the positions of components may vary within the effector module.

[0116] In some embodiments, the effector module may further comprise one or more additional features such as linker sequences (with specific sequences and lengths), cleavage sites, regulatory elements (that regulate expression of the protein of interest such as microRNA targeting sites), signal sequences that lead the effector module to a specific cellular or subcellular location, penetrating sequences, or tags and biomarkers for tracking the effector module.

[0117] In some embodiments, the DD may stabilize the protein of interest with a stabilization ratio of at least one in the presence of the stimulus. According to the present invention, the DD may destabilize the protein of interest in the absence of ligand with a destabilization ratio between 0, and 0.99.

[0118] The present invention also provides immunotherapeutic agents which may be a cytokine fused to its cognate cytokine receptor. In one embodiment, the immunotherapeutic agent of the invention may a fusion polypeptide comprising the whole or a portion of IL15 fused to the whole or a portion of the IL15Ra. Such fusion polypeptides may be membrane associated or secreted.

[0119] The invention provides isolated biocircuit polypeptides, effector modules, stimulus response elements (SREs) and payloads, as well as polynucleotides encoding any of the foregoing; vectors comprising polynucleotides of the invention; and cells expressing polypeptides, polynucleotides and vectors of the invention. The polypeptides, polynucleotides, viral vectors and cells are useful for inducing anti-tumor immune responses in a subject.

[0120] In some embodiments, the vector of the invention is a viral vector. The viral vector may include, but is not limited to a retroviral vector, an adenoviral vector, an adeno-associated viral vector, or a lentiviral vector.

[0121] In some embodiments, the vector of the invention may be a non-viral vector, such as a nanoparticles and liposomes.

[0122] The present invention also provides immune cells engineered to include one or more polypeptides, polynucleotides, or vectors of the present invention. The cells may be immune effector cells, including T cells such as cytotoxic T cells, helper T cells, memory T cells, regulatory T cells, natural killer (NK) cells, NK T cells, cytokine-induced killer (CIK) cells, cytotoxic T lymphocytes (CTLs), and tumor infiltrating lymphocytes (TILs). The engineered cell may be used for adoptive cell transfer for treating a disease (e.g., a cancer). Methods of enhancing the expansion and/or survival of immune cells are also disclosed herein.

[0123] The present invention also provides methods for inducing immune responses in a subject using the compositions of the invention. Also provided are methods for reducing a tumor burden in a subject using the compositions of the invention.

[0124] Provided herein are methods for tuning the expression and function of immunotherapeutic agent in cells or subjects. Such method may involve the administering effector modules containing an SRE operably linked to an immunotherapeutic agent. In some embodiments, the immunotherapeutic agent is IL15 or IL15 fused to IL15Ra. In some embodiments, the SRE is derived from FKBP, DHFR, PDE5, PPAR gamma, CA2 and NQO2.

[0125] The present invention provides compositions and methods for immunotherapy. The compositions relate to tunable systems and agents that induce anti-cancer immune responses in a cell or in a subject. The tunable system and agent may be a biocircuit system comprising at least one effector module that is responsive to at least one stimulus. The biocircuit system may be, but is not limited to, a destabilizing domain (DD) biocircuit system, a dimerization biocircuit system, a receptor biocircuit system, and a cell biocircuit system. These systems are further taught in co-owned U.S. Provisional Patent Application No. 62/320,864 filed Apr. 11, 2016, 62/466,596 filed Mar. 3, 2017 and the International Publication WO2017/180587 (the contents of each of which are herein incorporated by reference in their entirety).

[0126] In some embodiments, the composition for inducing an immune response may comprise an effector module. In some embodiments, the effector module may comprise a stimulus response element (SRE) operably linked to at least one payload. In one aspect, the payload may be an immunotherapeutic agent.

[0127] In some embodiments, the immunotherapeutic agent may be selected from, but not limited to a cytokine, a cytokine receptor, a cytokine-cytokine receptor fusion, and any combinations thereof.

[0128] In one aspect, the SRE of the composition may be responsive to or interact with at least one stimulus.

[0129] In some embodiments, the SRE may comprise a destabilizing domain (DD). The DD may be derived from a parent protein or from a mutant protein having one, two, there, or more amino acid mutations compared to the parent protein. In some embodiments, the parent protein may be selected from, but is not limited to, human protein FKBP, comprising the amino acid sequence of SEQ ID NO. 3935; human DHFR (hDHFR), comprising the amino acid sequence of SEQ ID NO. 3936; E. coli DHFR, comprising the amino acid sequence of SEQ ID NO. 3937; PDE5, comprising the amino acid sequence of SEQ ID NO. 3938; PPAR, gamma comprising the amino acid sequence of SEQ ID NO. 3939; CA2, comprising the amino acid sequence of SEQ ID NO. 394; or NQO2, comprising the amino acid sequence of SEQ ID NO. 3941.

[0130] In one aspect, the parent protein is hDHFR and the DD comprises a mutant protein. The mutant protein may comprise a single mutation and may be selected from, but not limited to hDHFR (I17V), hDHFR (F59S), hDHFR (N65D), hDHFR (K81R), hDHFR (A107V), hDHFR (Y122I), hDHFR (N127Y), hDHFR (M140I), hDHFR (K185E), hDHFR (N186D), and hDHTFR (M140I), hDHFR (Amino acid 2-187 of WT; N127Y), hDHFR (Amino acid 2-187 of WT; I17V), hDHFR (Amino acid 2-187 of WT; Y122I), and hDHFR (Amino acid 2-187 of WT; K185E). In some embodiments, the mutant protein may comprise two mutations and may be selected from, but not limited to, hDHFR (C7R, Y163C), hDHFR (A10V, H88Y), hDHFR (Q36K, Y122I), hDHFR (M53T, R138I), hDHFR (T57A, I72A), hDHFR (E63G, I176F), hDHFR (G21T, Y122I), hDHFR (L74N, Y122I), hDHFR (V75F, Y122I), hDHFR (L94A, T147A), DHFR (V121A, Y22I), hDHFR (Y122I, A125F), hDHFR (H131R, E144G), hDHFR (T137R, F143L), hDHFR (Y178H, E18IG), and hDHFR (Y183H, K185E), hDHFR (E162G, I176F) hDHFR (Amino acid 2-187 of WT; I17V, Y122I), hDHFR (Amino acid 2-187 of WT; Y122I, M140I), hDHFR (Amino acid 2-187 of WT; N127Y, Y122I), hDHFR (Amino acid 2-187 of WT; E162G, I176F), and hDHFR (Amino acid 2-187 of WT; H131R, E144G), and hDHFR (Amino acid 2-187 of WT; Y122I, A125F). In some embodiments, the mutant may comprise three mutations and the mutant may be selected from hDHFR (V9A, S93R, P150L), hDHFR (I8V, K133E, Y163C), hDHFR (L23S, V121A, Y157C), hDHFR (K19E, F89L, E181G), hDHFR (Q36F, N65F, Y122I), hDHFR (G54R, M140V, S168C), hDHFR (V110A, V136M, K177R), hDHFR (Q36F, Y122I, A125F), hDHFR (N49D, F59S, D153G), and hDHFR (G21E, I72V, I176T), hDHFR (Amino acid 2-187 of WT; Q36F, Y122I, A125F), hDHFR (Amino acid 2-187 of WT; Y122I, H131R, E144G), hDHFR (Amino acid 2-187 of WT; E31D, F32M, V116I), and hDHFR (Amino acid 2-187 of WT; Q36F, N65F, Y122I). In some embodiments, the mutant may comprise four or more mutations and the mutant may be selected from hDHFR (V2A, R33G, Q36R, L100P, K185R), hDHFR (Amino acid 2-187 of WT; D22S, F32M, R33S, Q36S, N65S), hDHFR (I17N, L98S, K99R, M112T, E151G, E162G, E172G), hDHFR (G16S, I17V, F89L, D96G, K123E, M140V, D146G, K156R), hDHFR (K81R, K99R, L100P, E102G, N108D, K123R, H128R, D142G, F180L, K185E), hDHFR (R138G, D142G, F143S, K156R, K158E, E162G, V166A, K177E, Y178C, K185E, N186S), hDHFR (N14S, P24S, F35L, M53T, K56E, R92G, S93G, N127S, H128Y, F135L, F143S, L159P, L160P, E173A, F180L), hDHFR (F35L, R37G, N65A, L68S, K69E, R71G, L80P, K99G, G117D, L132P, I139V, M140I, D142G, D146G, E173G, D187G), hDHFR (L28P, N30H, M38V, V44A, L68S, N73G, R78G, A97T, K99R, A107T, K109R, D111N, L134P, F135V, T147A, I152V, K158R, E172G, V182A, E184R), hDHFR (V2A, 117V, N30D, E31G, Q36R, F59S, K69E, I72T, H88Y, F89L, N108D, K109E, V110A, I115V, Y122D, L132P, F135S, M140V, E144G, T147A, Y157C, V170A, K174R, N186S), hDHFR (L100P, E102G, Q103R, P104S, E105G, N108D, V113A, W114R, Y122C, M126I, N127R, H128Y, L132P, F135P, I139T, F148S, F149L, I152V, D153A, D169G, V170A, I176A, K177R, V182A, K185R, N186S), and hDHFR (A10T, Q13R, N14S, N20D, P24S, N30S, M38T, T40A, K47R, N49S, K56R, I61T, K64R, K69R, I72A, R78G, E82G, F89L, D96G, N108D, M112V, W114R, Y122D, K123E, I139V, Q141R, D142G, F148L, E151G, E155G, Y157R, Q171R, Y183C, E184G, K185del, D187N).

[0131] In one aspect, the stimulus of the SRE may be Trimethoprim or Methotrexate.

[0132] In some embodiments, the immunotherapeutic agent of the composition may be a cytokine. The cytokine may be an interleukin, an interferon, a tumor necrosis factor, a transforming growth factor B, a CC chemokine, a CXC chemokine, a CX3C chemokine or a growth factor.

[0133] In one aspect, the interleukin may be a whole or a portion of a IL12 and may comprise a p40 subunit (the amino acid sequence of SEQ ID NO. 3942) or portion thereof and/or a p35 subunit (the amino acid sequence of SEQ ID NO. 3943). In one aspect, the IL12 may be modified. In some embodiments, the modifications may comprise fusing SEQ ID NO. 3942, and/or SEQ ID NO. 3943, to the whole or a portion of, a transmembrane domain. The IL12 may optionally be modified by incorporating a hinge domain.

[0134] In one aspect, the composition may include a first effector module (e.g., an effector module comprising IL12 or a portion thereof) and a second effector module. The second effector module may be a second SRE linked to an immunotherapeutic agent. As a non-limiting example, the immunotherapeutic agent is IL15 or an IL15/IL15Ra fusion polypeptide.

[0135] In one aspect, the SRE of the composition may stabilize the immunotherapeutic agent by a stabilization ratio of 1 or more. The stabilization ratio may comprise the ratio of expression, function or level of the immunotherapeutic agent in the presence of the stimulus to the expression, function or level of the immunotherapeutic agent in the absence of the stimulus.

[0136] In one aspect, the SRE of the composition may destabilize the immunotherapeutic agent by a destabilization ratio between 0, and 0.09. The destabilization ratio may comprise the ratio of expression, function or level of an immunotherapeutic agent in the absence of the stimulus specific to the SRE to the expression, function or level of the immunotherapeutic agent that is expressed constitutively, and in the absence of the stimulus specific to the SRE.

[0137] The present invention also provides polynucleotides comprising the compositions of the invention.

[0138] In one aspect, the polynucleotides may be a DNA or RNA molecule. In one aspect, the polynucleotides may comprise spatiotemporally selected codons. In one aspect, the polynucleotides of the invention may be a DNA molecule. In some embodiments, the polynucleotides may be an RNA molecule. In one aspect, the RNA molecule may be a messenger molecule. In some embodiments, the RNA molecule may be chemically modified.

[0139] In some embodiments, the polynucleotides may further comprise, at least one additional feature selected from, but not limited to, a promoter, a linker, a signal peptide, a tag, a cleavage site and a targeting peptide.

[0140] The present invention also provides vectors comprising polynucleotides described herein. In one aspect, the vector may be a viral vector. In some embodiments, the viral vector may be a retroviral vector, a lentiviral vector, a gamma retroviral vector, a recombinant AAV vector, an adeno viral vector, and an oncolytic viral vector.

[0141] The present invention also provides immune cells for adoptive cell transfer (ACT) which may express the compositions of the invention, the polynucleotides described herein. In one aspect, the immune cells may be infected or transfected with the vectors described herein. The immune cells for ACT may be selected from, but not limited to a CD8+ T cell, a CD4+ T cell, a helper T cell, a natural killer (NK) cell, a NKT cell, a cytotoxic T lymphocyte (CTL), a tumor infiltrating lymphocyte (TIL), a memory T cell, a regulatory T (Treg) cell, a cytokine-induced killer (CIK) cell, a dendritic cell, a human embryonic stem cell, a mesenchymal stem cell, a hematopoietic stem cell, or a mixture thereof.

[0142] In some embodiments, the immune cells may be autologous, allogeneic, syngeneic, or xenogeneic in relation to a particular individual subject.

[0143] The present invention provides methods for reducing a tumor volume or burden in a subject comprising contacting the subject with the immune cells of the invention. Also provided herein, is a method for inducing an anti-tumor immune response in a subject, comprising administering the immune cells of the system to the subject.

[0144] The present invention also provides methods for enhancing the expansion and/or survival of immune cells, comprising contacting the immune cells with the compositions of the invention, the polynucleotides of the invention, and/or the vectors of the invention.

[0145] Also provided herein, is a method for inducing an immune response in a subject, administering the compositions of the invention, the polynucleotides of the invention, and/or the immune cells of the invention to the subject.

[0146] In some embodiments, the effector module comprises a stimulus response element (SRE) and at least one payload comprising a protein of interest (POI).

[0147] In some embodiments, the SRE may be a destabilizing domain (DD). In some examples, the DD is a mutant domain derived from a protein such as FKBP (FK506 binding protein), E. coli DHFR (Dihydrofolate reductase) (ecDHFR), human DHFR (hDHFR), or any protein of interest. In this context, the biocircuit system is a DD biocircuit system.

[0148] The payload may be any immunotherapeutic agent used for cancer immunotherapy such as a cytokine. In one embodiment, the cytokine may be IL12. The SRE and payload may be operably linked through one or more linkers and the positions of components may vary within the effector module.

[0149] In some embodiments, the effector module may further comprise one or more additional features such as linker sequences (with specific sequences and lengths), cleavage sites, regulatory elements (that regulate expression of the protein of interest such as microRNA targeting sites), signal sequences that lead the effector module to a specific cellular or subcellular location, penetrating sequences, or tags and biomarkers for tracking the effector module.

[0150] In some embodiments, the DD may stabilize the immunotherapeutic agent with a stabilization ratio of at least one in the presence of the stimulus. According to the present invention, the DD may destabilize the immunotherapeutic agent in the absence of ligand with a destabilization ratio between 0, and 0.99.

[0151] The invention provides isolated biocircuit polypeptides, effector modules, stimulus response elements (SREs) and payloads, as well as polynucleotides encoding any of the foregoing; vectors comprising polynucleotides of the invention; and cells expressing polypeptides, polynucleotides and vectors of the invention. The polypeptides, polynucleotides, viral vectors and cells are useful for inducing anti-tumor immune responses in a subject.

[0152] In some embodiments, the vector of the invention is a viral vector. The viral vector may include, but is not limited to a retroviral vector, an adenoviral vector, an adeno-associated viral vector, or a lentiviral vector.

[0153] In some embodiments, the vector of the invention may be a non-viral vector, such as a nanoparticles and liposomes.

[0154] The present invention also provides immune cells engineered to include one or more polypeptides, polynucleotides, or vectors of the present invention. The cells may be immune effector cells, including T cells such as cytotoxic T cells, helper T cells, memory T cells, regulatory T cells, natural killer (NK) cells, NK T cells, cytokine-induced killer (CIK) cells, cytotoxic T lymphocytes (CTLs), and tumor infiltrating lymphocytes (TILs). The engineered cell may be used for adoptive cell transfer for treating a disease (e.g., a cancer).

[0155] Also provided herein are compositions and vectors containing a second effector module comprising second a stimulus response element (SRE) and at least second immunotherapeutic agent. In some embodiments, the immunotherapeutic agent may IL15 or IL15/IL15Ra fusion polypeptide.

[0156] The present invention also provides methods for inducing immune responses in a subject using the compositions of the invention. Also provided are methods for reducing a tumor burden in a subject using the compositions of the invention.

[0157] Provided herein are methods for tuning the expression and function of immunotherapeutic agent in cells or subjects. Such method may involve the administering effector modules containing an SRE operably linked to an immunotherapeutic agent. In some embodiments, the immunotherapeutic agent is IL12. In some embodiments, the SRE is derived from FKBP, DHFR, PDE5, PPAR gamma, CA2 and NQO2. Methods for pulsatile regulation of an immunotherapeutic agent using compositions described herein are also provided.

[0158] The present invention provides compositions and methods for immunotherapy. The compositions relate to tunable systems and agents that induce anti-cancer immune responses in a cell or in a subject. The tunable system and agent may be a biocircuit system comprising at least one effector module that is responsive to at least one stimulus. The biocircuit system may be, but is not limited to, a destabilizing domain (DD) biocircuit system, a dimerization biocircuit system, a receptor biocircuit system, and a cell biocircuit system. These systems are further taught in co-owned U.S. Provisional Patent Application No. 62/320,864 filed Apr. 11, 2016, 62/466,596 filed Mar. 3, 2017 and the International Publication WO2017/180587 (the contents each of which are herein incorporated by reference in their entirety).

[0159] In some embodiments, the composition for inducing an immune response may comprise a first effector module. In some embodiments, the effector module may comprise a first stimulus response element (SRE) operably linked to at least one payload. In one aspect, the payload may be an immunotherapeutic agent.

[0160] In some embodiments, the immunotherapeutic agent may be selected from, but is not limited to a cytokine, a safety switch, a regulatory switch, a chimeric antigen receptor and combinations thereof.

[0161] In one aspect, the first SRE of the composition may be responsive to or interact with at least one stimulus.

[0162] In some embodiments, the first SRE may comprise a destabilizing domain (DD). The DD may be derived from a parent protein or from a mutant protein having one, two, there, or more amino acid mutations compared to the parent protein. In some embodiments, the parent protein may be selected from, but is not limited to, human protein FKBP, comprising the amino acid sequence of SEQ. ID NO. 9344; human DHFR (hDHFR), comprising the amino acid sequence of SEQ. ID NO. 3945; E. coli DHFR, comprising the amino acid sequence of SEQ. ID NO. 3946; PDE5, comprising the amino acid sequence of SEQ. ID NO. 3947; PPAR, gamma comprising the amino acid sequence of SEQ. ID NO. 3948; CA2, comprising the amino acid sequence of SEQ. ID NO. 3949; or NQO2, comprising the amino acid sequence of SEQ. ID NO. 3950.

[0163] In one aspect, the parent protein is hDHFR and the DD comprises a mutant protein having at least one mutation selected from M1del, V2A, C7R, I8V, V9A, A10T, A10V, Q13R, N14S, G16S, I17N, I17V, K19E, N20D, G21T, G21E, D22S, L23S, P24S, L28P, N30D, N30H, N30S, E31G, E31D, F32M, R33G, R33S, F35L, Q36R, Q36S, Q36K, Q36F, R37G, M38V, M38T, T40A, V44A, K47R, N49S, N49D, M53T, G54R, K56E, K56R, T57A, F59S, I61T, K64R, N65A, N65S, N65D, N65F, L68S, K69E, K69R, R71G, I72T, I72A, I72V, N73G, L74N, V75F, R78G, L80P, K81R, E82G, H88Y, F89L, R92G, S93G, S93R, L94A, D96G, A97T, L98S, K99G, K99R, L100P, E102G, Q103R, P104S, E105G, A107T, A107V, N108D, K109E, K109R, V110A, D111N, M112T, M112V, V113A, W114R, I115V, V116I, G117D, V121A, Y122C, Y122D, Y122I, K123R, K123E, A125F, M126I, N127R, N127S, N127Y, H128R, H128Y, H131R, L132P, K133E, L134P, F135P, F135L, F135S, F135V, V136M, T137R, R138G, R138I, I139T, I139V, M140I, M140V, Q141R, D142G, F143S, F143L, E144G, D146G, T147A, F148S, F148L, F149L, P150L, E151G, I152V, D153A, D153G, E155G, K156R, Y157R, Y157C, K158E, K158R, L159P, L160P, E162G, Y163C, V166A, S168C, D169G, V170A, Q171R, E172G, E173G, E173A, K174R, I176A, I176F, I176T, K177E, K177R, Y178C, Y178H, F180L, E181G, V182A, Y183C, Y183H, E184R, E184G, K185R, K185del, K185E, N186S, N186D, D187G, and D187N.

[0164] In one aspect, the stimulus of the SRE may be Trimethoprim or Methotrexate.

[0165] In some embodiments, the immunotherapeutic agent may be a cytokine. In one aspect, the cytokine may be an interleukin, an interferon, a tumor necrosis factor, a transforming growth factor B, a CC chemokine, a CXC chemokine, a CX3C chemokine or a growth factor. In some embodiments, the cytokine is an interleukin. In some embodiments, the interleukin is selected from a group consisting of IL1, IL1-alpha, IL1-beta, IL1-delta, IL1-epsilon, I-eta, IL1-zeta, IL-RA, IL2, IL3, IL4, IL5, IL6, IL7, IL8, IL9, IL10, IL10C, IL10D, IL11a, IL11b, IL13, IL14, IL16, IL17, IL-17A, IL17B, IL17C, IL17E, IL17F, IL18, IL19, IL20, IL20L, IL21, IL22, IL23, IL23A, IL24, IL25, IL26, IL27, IL28, IL29, IL30, IL31, IL32, IL33, IL34, IL36α, IL36β, IL36γ, IL36RN, IL37, IL37a, IL37b, IL37c, Il37d, IL37e, and IL38.

[0166] In one aspect, the interleukin may be IL2, comprising the amino acid sequence of SEQ ID NO. 3951.

[0167] In one aspect, the immunotherapeutic agent may be a safety switch. In some embodiments, the safety switch may be selected from a Caspase 9, an inducible FAS (iFAS), an inducible caspase 9 (icasp9), a CD20/anti-CD20 antibody pair, a protein tag/anti-tag antibody, and a compact suicide gene (RQR8). In one aspect, the safety switch may be Caspase 9 comprising the amino acid sequence of SEQ ID NO. 3952.

[0168] In one aspect, the immunotherapeutic agent may encode a regulatory switch. In some embodiments, the regulatory switch may be selected from a FOXP3, a Nr4a, a FOXO, and a NF-κB. In one aspect, the regulatory switch may be a FOXP3, comprising the amino acid sequence of SEQ ID NO. 3953-3956.

[0169] In one aspect, the immunotherapeutic agent may be a chimeric antigen receptor (CAR). In some embodiments, the CAR may be selected from a GD2 CAR, a Her2 CAR, a BCMA CAR, a CD33 CAR, an ALK CAR, a CD22 CAR, and a CD276 CAR. The CARs described herein may comprise an extracellular moiety, a transmembrane domain, an intracellular signaling domain, and optionally, one or more co-stimulatory domains.

[0170] In one aspect, the CAR may be selected from, but is not limited, to a standard CAR, a split CAR, an off-switch CAR, an on-switch CAR, a first-generation CAR, a second-generation CAR, a third-generation CAR, or a fourth-generation CAR.

[0171] In some embodiments, the extracellular target moiety of the CAR may be selected from, but is not limited to an Ig NAR, a Fab fragment, a Fab′ fragment, a F(ab)′2 fragment, a F(ab)′3 fragment, an Fv, a single chain variable fragment (scFv), a bis-scFv, a (scFv)2, a minibody, a diabody, a triabody, a tetrabody, an intrabody, a disulfide stabilized Fv protein (dsFv), a unibody, a nanobody, and an antigen binding region derived from an antibody that may specifically bind to any of a protein of interest, a ligand, a receptor, a receptor fragment or a peptide aptamer.

[0172] In some embodiments, the extracellular target moiety may be selected from an ALK target moiety, comprising the amino acid sequence of SEQ ID NO. 3957-3972 and 3973-3980, a CD22 target moiety, comprising the amino acid sequence of SEQ ID NO. 3981, 775-777 and 2742, and 3982-3984, a CD276 target moiety, comprising the amino acid sequence of SEQ ID NO. 3985-3992, and 3993-3996, a GD2 target moiety, comprising the amino acid sequence of SEQ ID NO. 3997-4075, and 4075-4104, a CD33 target moiety, comprising the amino acid sequence of SEQ ID NO. 4105-4112, a BCMA target moiety, comprising the amino acid sequence of SEQ ID NO. 4113-4120, and a Her2 target moiety, comprising the amino acid sequence of SEQ ID NO. 4121-4176, and 4177-4184.

[0173] In some embodiments, the intracellular signaling domain of the CAR may be derived from T cell receptor CD3zeta or a cell surface molecule selected from the group consisting of FcR gamma, FcR beta, CD3 gamma, CD3 delta, CD3 epsilon, CD5, CD22, CD79a, CD79b, and CD66d.

[0174] In some embodiments, the CAR may comprise a co-stimulatory domain. The costimulatory domain may be selected from the group consisting of 2B4, HVEM, ICOS, LAG3, DAP10, DAP12, CD27, CD28, 4-1BB (CD137), OX40 (CD134), CD30, CD40, ICOS (CD278), glucocorticoid-induced tumor necrosis factor receptor (GITR), lymphocyte function-associated antigen-1 (LFA-1), CD2, CD7, LIGHT, NKG2C, and B7-H3.

[0175] In one embodiment, the transmembrane domain of the CAR may be derived from a transmembrane domain. In one aspect, the transmembrane domain may comprise the amino acid sequence selected from, but not limited to SEQ ID NO. 981-1030, 1032-1078, and 2743.

[0176] In some embodiments, the CAR of the effector module may further comprise a hinge region near the transmembrane domain. In one aspect, the hinge region may comprise an amino acid sequence selected from the group consisting of any of SEQ ID NOs. 109-117, 119-422, 424-633, 635-773, 775-1030, 1032-1145, 2738-2739 and 2741-2743.

[0177] In one aspect, the first effector module may comprise an IL2-DD, comprising the amino acid sequence of any of SEQ ID NOs. 4185-4187.

[0178] In one aspect, the first effector module may comprise a Caspase 9-DD, comprising the amino acid sequence of any of SEQ ID NOs. 4188-4196.

[0179] In one aspect, the first effector module may comprise a FOXP3-DD, comprising the amino acid sequence of any of SEQ ID NOs. 4197-4206.

[0180] In one aspect, the first effector module may comprise a BCMA CAR-DD, comprising the amino acid sequence of any of SEQ ID NOs. 4207-4209.

[0181] In one aspect, the first effector module may comprise a HER2-DD, comprising the amino acid sequence of any of SEQ ID NO. 4210.

[0182] The present invention, also provides polynucleotides encoding the compositions of the invention.

[0183] In one aspect, the polynucleotides may be a DNA or RNA molecule. In one aspect, the polynucleotides may comprise spatiotemporally selected codons. In some embodiments, the polynucleotides may be an RNA molecule. In one aspect, the RNA molecule may be a messenger molecule. In some embodiments, the RNA molecule may be chemically modified. In some embodiments, the polynucleotides may comprise spatiotemporally selected codons.

[0184] In some embodiments, the polynucleotides may further comprise, at least one additional feature selected from, but not limited to, a promoter, a linker, a signal peptide, a tag, a cleavage site and a targeting peptide.

[0185] The present invention also provides vectors comprising polynucleotides described herein. In one aspect, the vector may be a viral vector. In some embodiments, the viral vector may be a retroviral vector, a lentiviral vector, a gamma retroviral vector, a recombinant AAV vector, an adeno viral vector, and an oncolytic viral vector.

[0186] The present invention also provides immune cells for adoptive cell transfer (ACT) which may express the compositions of the invention, the polynucleotides described herein. In one aspect, the immune cells may be infected or transfected with the vectors described herein. The immune cells for ACT may be selected from, but not limited to a CD8+ T cell, a CD4+ T cell, a helper T cell, a natural killer (NK) cell, a NKT cell, a cytotoxic T lymphocyte (CTL), a tumor infiltrating lymphocyte (TIL), a memory T cell, a regulatory T (Treg) cell, a cytokine-induced killer (CIK) cell, a dendritic cell, a human embryonic stem cell, a mesenchymal stem cell, a hematopoietic stem cell, or a mixture thereof.

[0187] In one aspect, the immune cell may comprise a destabilizing domain DD, wherein the DD is derived from human protein FKBP comprising the amino acid sequence of SEQ ID NO. 4211, DHFR comprising the amino acid sequence of SEQ ID NO. 4212-4213, PDE5 comprising the amino acid sequence of SEQ ID NO. 4214, PPAR gamma comprising the amino acid sequence of SEQ ID NO. 4215, CA2 comprising the amino acid sequence of SEQ ID NO. 4216 and NQO2 comprising the amino acid sequence of SEQ ID NO. 4217.

[0188] In one aspect, the DD may be derived from a parent protein and the parent protein is hDHFR and the DD comprises a mutant protein having at least one mutation selected from M1del, V2A, C7R, I8V, V9A, A10T, A10V, Q13R, N14S, G16S, I17N, I17V, K19E, N20D, G21T, G21E, D22S, L23S, P24S, L28P, N30D, N30H, N30S, E31G, E31D, F32M, R33G, R33S, F35L, Q36R, Q36S, Q36K, Q36F, R37G, M38V, M38T, T40A, V44A, K47R, N49S, N49D, M53T, G54R, K56E, K56R, T57A, F59S, I61T, K64R, N65A, N65S, N65D, N65F, L68S, K69E, K69R, R71G, I72T, I72A, I72V, N73G, L74N, V75F, R78G, L80P, K81R, E82G, H88Y, F89L, R92G, S93G, S93R, L94A, D96G, A97T, L98S, K99G, K99R, L100P, E102G, Q103R, P104S, E105G, A107T, A107V, N108D, K109E, K109R, V110A, D111N, M112T, M112V, V113A, W114R, I115V, V116I, G117D, V121A, Y122C, Y122D, Y122I, K123R, K123E, A125F, M126I, N127R, N127S, N127Y, H128R, H128Y, H131R, L132P, K133E, L134P, F135P, F135L, F135S, F135V, V136M, T137R, R138G, R138I, I139T, I139V, M140I, M140V, Q141R, D142G, F143S, F143L, E144G, D146G, T147A, F148S, F148L, F149L, P150L, E151G, I152V, D153A, D153G, E155G, K156R, Y157R, Y157C, K158E, K158R, L159P, L160P, E162G, Y163C, V166A, S168C, D169G, V170A, Q171R, E172G, E173G, E173A, K174R, I176A, I176F, I176T, K177E, K177R, Y178C, Y178H, F180L, E181G, V182A, Y183C, Y183H, E184R, E184G, K185R, K185del, K185E, N186S, N186D, D187G, and D187N.

[0189] In some embodiments, the immune cells may be autologous, allogeneic, syngeneic, or xenogeneic in relation to a particular individual subject.

[0190] The present invention provides methods for reducing a tumor volume or burden in a subject comprising contacting the subject with the immune cells of the invention. Also provided herein, is a method for inducing an anti-tumor immune response in a subject, comprising administering the immune cells of the system to the subject.

[0191] Also provided herein, is a method for inducing an immune response in a subject, administering the compositions of the invention, the polynucleotides of the invention, and/or the immune cells of the invention to the subject.

[0192] The present invention also provides methods for preventing or reversing T cell exhaustion in a subject in need thereof. Such methods may comprise administering to the subject, a therapeutically effective amount of compositions described herein, the polynucleotides of the invention, the vectors of the invention, or the immune cells described herein. Such methods may comprise an SRE that responds to a stimulus and tunes the expression and/or function of the immunotherapeutic agent, thereby preventing or reversing T cell exhaustion.

[0193] In some aspects, the immunotherapeutic agent is a chimeric antigen receptor. In some embodiments, the chimeric antigen receptor may be a GD2 CAR, a BCMA CAR, a CD33 CAR, a Her2 CAR, an ALK CAR, a CD22 CAR, or a CD276 CAR.

[0194] Also provided herein, is a method for detecting cancer in a mammal, comprising the steps of (a) contacting a sample comprising one or more cells from the mammal with the compositions, the polynucleotides, the vector or the immune cells of the invention, and (b) detecting the complex, wherein the detection of the complex may be indicative of the presence of cancer in the mammal.

[0195] In some embodiments, the effector module comprises a stimulus response element (SRE) and at least one payload comprising a protein of interest (POI).

[0196] In some embodiments, the SRE may be a destabilizing domain (DD). In some examples, the DD is a mutant domain derived from a protein such as FKBP (FK506 binding protein), E. coli DHFR (Dihydrofolate reductase) (ecDHFR), human DHFR (hDHFR), or any protein of interest. In this context, the biocircuit system is a DD biocircuit system.

[0197] The payload may be any immunotherapeutic agent used for cancer immunotherapy such as a cytokine such as IL2, a safety switch such as Caspase 9, a regulatory switch encoding FOXP3, a chimeric antigen receptor such as BCMA CAR, CD33 CAR, GD2 CAR, Her2 CAR, ALK CAR, CD22 CAR, CD276 CAR or any agent that can induce an immune response. The SRE and payload may be operably linked through one or more linkers and the positions of components may vary within the effector module.

[0198] In some embodiments, the effector module may further comprise of one or more additional features such as linker sequences (with specific sequences and lengths), cleavage sites, regulatory elements (that regulate expression of the protein of interest such as microRNA targeting sites), signal sequences that lead the effector module to a specific cellular or subcellular location, penetrating sequences, or tags and biomarkers for tracking the effector module.

[0199] The invention provides isolated biocircuit polypeptides, effector modules, stimulus response elements (SREs) and payloads, as well as polynucleotides encoding any of the foregoing; vectors comprising polynucleotides of the invention; and cells expressing polypeptides, polynucleotides and vectors of the invention. The polypeptides, polynucleotides, viral vectors and cells are useful for inducing anti-tumor immune responses in a subject.

[0200] In some embodiments, the vector of the invention is a viral vector. The viral vector may include, but is not limited to a retroviral vector, an adenoviral vector, an adeno-associated viral vector, or a lentiviral vector.

[0201] In some embodiments, the vector of the invention may be a non-viral vector, such as a nanoparticles and liposomes.

[0202] The present invention also provides immune cells engineered to include one or more polypeptides, polynucleotides, or vectors of the present invention. The cells may be immune effector cells, including T cells such as cytotoxic T cells, helper T cells, memory T cells, regulatory T cells, natural killer (NK) cells, NK T cells, cytokine-induced killer (CIK) cells, cytotoxic T lymphocytes (CTLs), and tumor infiltrating lymphocytes (TILs). The engineered cell may be used for adoptive cell transfer for treating a disease (e.g., a cancer).

[0203] The present invention also provides methods for inducing immune responses in a subject using the compositions of the invention. Also provided are methods for reducing a tumor burden in a subject using the compositions of the invention and methods for preventing or reversing T cell exhaustion.

### BRIEF DESCRIPTION OF THE DRAWINGS

[0204] FIG. 1 shows an overview diagram of a biocircuit system of the invention. The biocircuit comprises a stimulus and at least one effector module responsive to a stimulus, where the response to the stimulus produces a signal or outcome. The effector module comprises at least one stimulus response element (SRE) and one payload.

[0205] FIG. 2 shows representative effector modules carrying one payload. The signal sequence (SS), SRE and payload may be located or positioned in various arrangements without (A to F) or with (G to Z, and AA to DD) a cleavage site. An optional linker may be inserted between each component of the effector module.

[0206] FIG. 3 shows representative effector modules carrying two payloads without a cleavage site. The two payloads may be either directly linked to each other or separated.

[0207] FIG. 4 shows representative effector modules carrying two payloads with a cleavage site. In one embodiment, an SS is positioned at the N-terminus of the construct, while other components: SRE, two payloads and the cleavage site may be located at different positions (A to L). In another embodiment, the cleavage site is positioned at the N-terminus of the construct (M to X). An optional linker may be inserted between each component of the effector module.

[0208] FIG. 5 shows effector modules of the invention carrying two payloads, where an SRE is positioned at the N-terminus of the construct (A to L), while SS, two payloads and the cleavage site can be in any configuration. An optional linker may be inserted between each component of the effector module.

[0209] FIG. 6 shows effector modules of the invention carrying two payloads, where either the two payloads (A to F) or one of the two payloads (G to X) is positioned at the N-terminus of the construct (A to L), while SS, SRE and the cleavage site can be in any configuration. An optional linker may be inserted between each component of the effector module.

[0210] FIG. 7A-FIG. 7B depict representative configurations of the stimulus and effector module within a biocircuit system. FIG. 7A and FIG. 7B show that a trans-membrane effector module is activated either by a free stimulus (FIG. 7A) or a membrane bound stimulus (FIG. 7B) which binds to SRE. The response to the stimulus causes the cleavage of the intracellular signal/payload, which activates down-stream effector/payload.

[0211] FIG. 8 depicts a dual stimulus-dual presenter biocircuit system, where two bound stimuli (A and B) from two different presenters (e.g., different cells) bind to two different effector modules in a single receiver (e.g., another single cell) simultaneously and create a dual-signal to downstream payloads.

[0212] FIG. 9 depicts a dual stimulus-single presenter biocircuit system, where two bound stimuli (A and B) from the same presenter (e.g., a single cell) bind to two different effector modules in another single cell simultaneously and create a dual-signal.

[0213] FIG. 10 depicts a single-stimulus-bridged receiver biocircuit system. In this configuration, a bound stimulus (A) binds to an effector module in the bridge cell and creates a signal to activate a payload which is a stimulus (B) for another effector module in the final receiver (e.g., another cell).

[0214] FIG. 11 depicts a single stimulus-single receiver biocircuit system, wherein the single receiver contains the two effector modules which are sequentially activated by a single stimulus.

[0215] FIG. 12 depicts a biocircuit system which requires a dual activation. In this embodiment, one stimulus must bind the transmembrane effector module first to prime the receiver cell being activated by the other stimulus. The receiver only activates when it senses both stimuli (B).

[0216] FIG. 13 depicts a standard effector module of a chimeric antigen receptor (CAR) system which comprises an antigen binding domain as an SRE, and signaling domain(s) as payload.

[0217] FIG. 14 depicts the structure design of a regulatable CAR system, where the trans-membrane effector modules comprise antigen binding domains sensing an antigen and a first switch domain and the intracellular module comprises a second switch domain and signaling domains. A stimulus (e.g., a dimerization small molecule) can dimerize the first and second switch domains and assemble an activated CAR system.

[0218] FIG. 15A-FIG. 15C show schematic representation of CAR systems having one (FIG. 15A) or two (FIG. 15B and FIG. 15C) SREs incorporated into the effector module.

[0219] FIG. 16A-FIG. 16C depict a split CAR design to control T cell activation by a dual stimulus (e.g., an antigen and small molecule). FIG. 16A shows normal T cell activation which entails a dual activation of TCR and co-stimulatory receptor. The regular CAR design (FIG. 16B) combines the antigen recognition domain with TCR signaling motif and co-stimulatory motif in a single molecule. The split CAR system (FIG. 16C) separates the components of the regular CAR into two separate effector modules which can be reassembled when a heterodimerizing small molecule (stimulus) is present.

[0220] FIG. 17A-FIG. 17B depict the positive and negative regulation of CAR engineered T cell activation. The absence or presence of a second stimulus can negatively (FIG. 17A) or positively (FIG. 17B) control T cell activation.

[0221] FIG. 18A-FIG. 18D show schematic representation of gated activation of CAR engineered T cells. FIG. 18A-FIG. 18C show if a normal cell has no stimulus (e.g., an antigen) (FIG. 18A) or an antigen that cannot bind to the trans-membrane effector module (FIG. 18B), or only an antigen that activates the trans-membrane effector module and primes the receiver T cell to express the second effector (FIG. 18C), the receiver T cell remains inactive. When both stimuli (e.g. two antigens) that bind the trans-membrane effector module and the primed effector, are present on the presenter cell (e.g. a cancer cell), the T cell is activated (FIG. 18D).

[0222] FIG. 19A-FIG. 19F show hDHFR mutants' expression in a western blot using Anti-AcGFP antibody (FIG. 19A-FIG. 19C) or anti-human DHFR antibody (FIG. 19D-FIG. 19F).

[0223] FIG. 20A-FIG. 20B show GFP intensity of hDHFR mutants. FIG. 20A shows GFP intensity of hDHFR mutants in the absence of ligand as measured by FACS. FIG. 20B shows GFP intensity of hDHFR mutants in the presence of ligand as measured by FACS.

[0224] FIG. 21A-FIG. 21B show MTX or TMP titration with hDHFR mutants. FIG. 21A shows MTX titration with hDHFR mutant as measured by FACS. FIG. 21B shows TMP titration with hDHFR mutant as measured by FACS.

[0225] FIG. 22 shows responsiveness of hDHFR mutants to ligand withdrawal as measured by FACS.

[0226] FIG. 23 shows hDHFR-IL15/IL15Ra fusion protein expression in a western blot using anti IL15 and anti hDHFR antibodies.

[0227] FIG. 24A-FIG. 24D show IL15 protein levels and surface expression of IL15 and IL15Ra. FIG. 24A is a western blot of IL15 protein levels in 293T cells. FIG. 24B and FIG. 24C are histograms depicting surface expression of IL15 and IL15Ra respectively. FIG. 24 D is a western blot of IL15 and hDHFR in HCT116 cells.

[0228] FIG. 25A and FIG. 25B show the sequence alignment of wildtype DHFR (SEQ ID NO. 4218) with hDHFR mutants. FIG. 25A and FIG. 25B disclose SEQ ID NOS 3093-3094, respectively, in order of appearance.

[0229] FIG. 26 shows the expression of IL15/IL15Ra fusion protein expression in a western blot using anti IL15 Ra antibody.

[0230] FIG. 27 is a western blot of IL15Ra protein levels in HCT116 cells.

[0231] FIG. 28A-FIG. 28B show expression of CD19 chimeric antigen receptors. FIG. 28A shows the expression of CD19 chimeric antigen receptors in a western blot using CD3 Zeta antibody. FIG. 28B shows the expression of CD19 chimeric antigen receptors in a western blot using 4-1BB antibody.

[0232] FIG. 29A-FIG. 29D depict results of expression assays for CD19 CAR components. FIG. 29A and FIG. 29B are western blots depicting the protein levels of CD3 Zeta of the DD-CD19 CAR construct and actin. FIG. 29C shows the expression of CD19 chimeric antigen receptors in a western blot using 4-1BB antibody. FIG. 29D is a bar graph depicting the surface expression of CD19 CAR.

[0233] FIG. 30A-FIG. 30B depict expression of DHFR mutants with Trimethoprim or Methotrexate in HEK293 cells. FIG. 30A shows the expression of DHFR mutants with increasing concentrations of Trimethoprim in a western blot using GFP antibody. FIG. 30B shows the expression of DHFR mutants with increasing concentrations of Methotrexate in a western blot using GFP antibody.

[0234] FIG. 31A-FIG. 31D depict results from assays measuring IL12 levels. FIG. 31A is a bar graph depicting IL12 levels in the various dilutions of media derived from cells expressing DD-IL12. FIG. 31B is a bar graph depicting the Shield-1 dose responsive induction of DD-IL12.

[0235] FIG. 31C depicts plasma IL12 levels in mice implanted with SKOV3 cells. FIG. 31D depicts plasma IL12 levels in mice in response to different Shield-1 dosing regimens.

[0236] FIG. 32 denotes the frequency of IFNgamma positive T cells.

[0237] FIG. 33A-FIG. 33D depict analysis of human T cell responses in vitro and in vivo. FIG. 33A depicts IFN gamma production in T cells. FIG. 33B depicts T cell expansion with IL15/IL15Ra treatment. FIG. 33C is a dot plot depicting percentage human cells after in vivo cell transfer. FIG. 33D is a scatter plot depicting CD4+/CD8+ T cells.

[0238] FIG. 34A-FIG. 34B show CAR expression and functionality in T cells. FIG. 34A depicts T cell subpopulations expressing CD19 CAR. FIG. 34B depicts cell death caused by CD19 CAR expressing T cells.

[0239] FIG. 35A-FIG. 35C show expression analyses of IL15-IL15Ra in T cells. FIG. 35A is a bar graph depicting IL15Ra positive cells with 24 hour TMP treatment. FIG. 35B is a bar graph depicting IL15Ra positive cells with 48 hour TMP treatment. FIG. 35C is a bar graph depicting IL15Ra positive cells in response to varying concentrations of TMP.

[0240] FIG. 36A-FIG. 36D show analyses of the effect of IL15-IL15Ra on T cell persistence and T cell memory phenotype. FIG. 36A represents percentage of human T in cells blood with respect to mouse T cells. FIG. 36B represents the number of T cells in blood. FIG. 36C represents ratio of CD4 to CD8 cells in the blood. FIG. 36D represents the percentage of IL15Ra positive CD4 and CD8 T cells in the blood.

[0241] FIG. 37A-FIG. 37D show effect of cytokines on T cell expansion and activation. FIG. 37A depicts the expansion of T cells in response to cytokine treatment. FIG. 37B-FIG. 37D depict the frequency of IFN gamma positive cells with IL12 treatment.

[0242] FIG. 38 is a bar graph representing the effect of promoters on transgene expression.

[0243] FIG. 39A-FIG. 39C show results of assays for ligand dependent target cell death induced by DD regulates CD19 CAR. FIG. 39A shows the expression of CD19 in parental K562 cells and K562-CD19 cells. FIG. 39B shows the proliferation of K562 cells cocultured with T cells expressing DD regulated CAR constructs, in the presence or absence of ligand. FIG. 39C shows the area of target cells killed by T cells expressing DD regulated CAR constructs, in the presence of ligand.

[0244] FIG. 40A-FIG. 40B show effects of ligands on expression of cytokines in T cells transduced with regulates CD19 CAR constructs. FIG. 40A shows IFNgamma concentration.

[0245] FIG. 40B shows IL2 concentration.

[0246] FIG. 41A-FIG. 41C show analyses of IL12 levels in vivo for mice injected with HCT116 parental cells or cells transduced with IL12 constructs. FIG. 41A provides the final IL12 concentration for each of the four groups tested. FIG. 41B-FIG. 41C show that IL12 is detectable in kidney (FIG. 41B) and that IL12 is detectable in tumor (FIG. 41C).

[0247] FIG. 42A-FIG. 42C show analyses of IL12 levels in vivo for mice injected subcutaneously with HCT116 parental cells or cells transduced with IL12 constructs and treated with vehicle or Aquashield. FIG. 42A shows the regulation of IL12 over 24 hours. FIG. 42B shows the regulation in the plasma and FIG. 42C shows the detection of flexi-IL12 in the kidneys.

[0248] FIG. 43A-FIG. 43C show IL12 production by primary human T cells with regulated IL12 construct. FIG. 43A shows that restimulation increased the expression of IL12. FIG. 43B and FIG. 43C show that ligand increased production of IL12.

[0249] FIG. 44A-FIG. 44B show ligand concentration-dependent and time course of IL12 production by T cells with regulated IL12 construct. FIG. 44A shows the concentration-dependent induction of IL12 secretion from primary human T cells. FIG. 44B shows the time course induction of IL12 secretion from primary human T cells.

[0250] FIG. 45A-FIG. 45B show in vivo dose response and repeat dosing in mice with transferred T cells expressing IL12 constructs. FIG. 45A shows the dose response of Aquashield-Induced DD-IL12 regulation in vivo. FIG. 45B shows that plasma levels of IL12 remain high in animals transplanted with constitutive IL12 transduced T cells.

[0251] FIG. 46A-FIG. 46F show results of in vivo IL12 expression with T cells expressing IL12 constructs. FIG. 46A-FIG. 46B show the expression of IL12 in vivo over 7 days. FIG. 46C-FIG. 46D show the expression of IL12 in vivo over 11 days. FIG. 46E shows the Geometric MFI (GeoMFI) of Granzyme B (GrB) after 7 days in CD8+ T cells. FIG. 46F shows the GeoMFI of Perforin at day 7 in CD8+ T cells.

[0252] FIG. 47A-FIG. 47B show effects of a PGK promoter and an N-terminal FKBP in constructs expressing IL12. FIG. 47A shows the regulation of IL12 with PGK and EF1a promoters and FKBP domains. FIG. 47B shows the relative expression of IL12.

[0253] FIG. 48 depicts the kinetics of IL15Ra surface expression on CD4 T cells after TMP treatment.

[0254] FIG. 49 represents a western blot of IL15-IL15Ra protein in HCT116 tumors from mice treated with TMP for 17 days in xenograft assays.

[0255] FIG. 50 is a graph of the results of the MSD assay of IL15 protein levels in HEK293 cells.

[0256] FIG. 51A-FIG. 51B depict membrane bound IL15 expression. FIG. 51A provides FACS plots showing the expression of membrane bound IL15 after a dose response study of TMP. FIG. 51B is two graphs showing the dose and time of exposure of TMP in vitro influences membrane bound IL15 expression.

[0257] FIG. 52A-FIG. 52D show analyses of regulated membrane bound IL15 expression in vivo. FIG. 52A-FIG. 52C show the regulation of membrane bound IL15 using IL15 (FIG. 52A), IL15Ra (FIG. 52B), or IL15/IL15Ra double++staining (FIG. 52C). FIG. 52D shows FACS plots of the expression of IL15. FIG. 52E is a graph of the regulation of IL15 in blood and FIG. 52F is a graph of the plasma TMP levels.

[0258] FIG. 53 represents the regulation of membrane bound IL15 with PO or IP dosing of TMP.

[0259] FIG. 54A-FIG. 54C show analyses for IL15 shedding from cells expressing IL15-IL15Ra fusion constructs. FIG. 54A is a western blot of IL15Ra protein levels in HCT116 cells. IL15 levels in the media measured by ELISA are represented in FIG. 54B and levels measured using the MSD assay are presented in FIG. 54C.

[0260] FIG. 55A-FIG. 55B show results from an in vivo tumor study with IL15-IL15Ra constructs. FIG. 55A represents the tumor growth of HCT116 cells in xenograft assays. FIG. 55B represents tumor growth of HCT116 cells expressing IL15/IL15Ra fusion constructs with ligand treatment.

[0261] FIG. 56 depicts plasma IL12 levels in mice in response to different Shield-1 dosing regimens.

[0262] FIG. 57A-FIG. 57E depict protomer and cell type effects on expression of IL12 constructs. FIG. 57A and FIG. 57B depict the effect of promoter on IL12 levels. FIG. 57C depicts the effect of ligand concentration and promoter on IL12 levels. FIG. 57D shows the effect of promoter on IL12 levels in HCT116 cells. FIG. 57E depicts IL12 levels in Raji cells.

[0263] FIG. 58 is a line graph depicting the effect of Shield-1 on DD-IL2 levels.

[0264] FIG. 59A-FIG. 59B show DD regulated luciferase expression and activity. FIG. 59A is a western blot depicting luciferase levels in DD-luciferase expressing cells. FIG. 59B depicts luciferase activity.

[0265] FIG. 60A-FIG. 60B show DD regulated FOXP3 expression. FIG. 60A and FIG. 60B are western blot depicting DD regulated expression of FOXP3.

[0266] FIG. 61 represents Shield-1 regulation of DD-IL2 secretion from HCT116 cells in vivo.

[0267] FIG. 62 depicts the viability of T cells cultured with different ratios of CD3/CD8 beads.

[0268] FIG. 63 represents the percentage BCMA CAR positive T cells with ligand treatment.

[0269] FIG. 64 represents the proliferation of cell lines in response to cytokines.

### DETAILED DESCRIPTION OF THE INVENTION

[0270] The details of one or more embodiments of the invention are set forth in the accompanying description below. Although any materials and methods similar or equivalent to those described herein can be used in the practice or testing of the present invention, the preferred materials and methods are now described. Other features, objects and advantages of the invention will be apparent from the description. In the description, the singular forms also include the plural unless the context clearly dictates otherwise. Unless defined otherwise, all technical and scientific terms used herein have the same meaning as commonly understood by one of ordinary skill in the art to which this invention belongs. In the case of conflict, the present description will control.

### I. INTRODUCTION

### Protein Regulation

[0271] The ability to conditionally control protein levels is a powerful tool in gene and cell therapy. Techniques to control protein expression on a genetic level have been widely studied. The Cre-Lox technology provides a useful approach to activate or inactivate genes. Tissue or cell specific promoters can be used to control spatial and temporal expression of genes of interest. However, this system is limited in application due to the irreversible nature of the perturbation. The transcription of the gene of interest can be conditionally regulated using tools such as Doxycycline (Dox)-inducible system. Alternatively, the stability of mRNA can be regulated using RNA interference techniques. However, methods targeting DNA or RNA are slow acting, irreversible and have low efficiency.

[0272] Direct manipulation of activities at the protein level provides significant advantages in flexibility, reversibility and speed. Strategies which directly trigger a cell's natural degradation system have been developed. Szostak and colleagues showed that a small peptide sequence could be fused to the N-terminus of a protein of interest to modulate protein stability (Park, E-C., et al., Proc. Natl. Acad. Sci. U.S.A. 1992, 89:1249-1252). Varshavsky and coworkers isolated a temperature-sensitive peptide sequence that greatly reduced the half-life of dihydrofolate reductase (DHFR) at the non-permissive temperatures (Dohmen et al. Science 1994, 263:1273-1276). These mutants have been widely used to study protein functions in yeast (Labib et al. Science 2000, 288:1643-1646; and Kanemaki et al. Nature 2003, 423:720-724).

[0273] Subsequently, reversible systems employing a rapamycin derivative for the regulation of GSK-3β kinase fused to an unstable triple-mutant of the FRB domain (FRB*) were developed. The rapamycin derivative induces dimerization of the FRB*-GSK-3β and endogenous FKBP12 and stabilizes the FRB* fusion thus restoring the function of the fused kinase. (Stankunas et al., Mol Cell. 2003; 12:1615-1624 and Liu et al., Nature. 2007; 446:79-82).

[0274] Building on the FRB* domain system, Banaszynski, et al., developed a cell-permeable ligand system using mutants of FKBP12 protein which were engineered to be unstable in the absence of a high-affinity ligand, Shield-1. (Banaszynski et al., Cell. 2006; 126:995-1004). They termed these unstable domains, destabilizing domains (DDs).

[0275] The FKBP/shield-1 tuning system has been successfully used in several studies to control target proteins. For example, Dettwier et al., fused FKBP to tune the express of NADPH P450 oxidoreductase (POR) (Dettwier et al., PLoS One, 2014, 9(11): e113540).

[0276] The FKBP DD-shield system has been used in cell lines, transgenic mice, protozoan Entamoeba histolytica, the flatworm Caenorhabditis elegans, the medaka, and transgenic xenografts to investigate the activity of a protein of interest (Maynard-Smith et al., J Biol Chem. 2007, 282(34): 24866-24872; Liu et al., Int J Parasitol. 2014, 44(10):729-735; Cho et al., PLoS One. 2013, 8(8): e72393); Banaszynski et al. Nat Med. 2008, 14(10):1123-1127; Rodriguez and Wolfgang, Chem Biol. 2011, 19(3):391-398; and Froschauer et al., PLoS One, 2015, 10(7): e0131252), for iPSC reprogramming (Sui et al., Stem cell Reports., 2014, 2(5): 721-733).

[0277] In addition, the destabilizing domain has been used for the conditional knock down/knock out of the target gene fused with the destabilizing domain. Park et al achieved this genomic engineering by CRISPR/Cas9-mediated homologous recombination and a donor template coding for a resistance cassette and the DD-tagged TCOF1 sequence (Park et al., PLoS One. 2014, 9(4): e95101).

[0278] More recently protein switches useful as biosensors as well as new chimeric antigen receptors and other small molecule stabilization frameworks have been disclosed (An W, et al. PLoS ONE, 2015, 10(12): e0145783. doi: 10.1371/journal.pone.0145783; Nicholes, et al., Protein Engineering, Design & Selection, 2016, vol. 29 no. 2, pp. 77-85; Nath, et al., Biochemical and Biophysical Research Communications, 2016, 470: 411e416); Stevers, et al., PNAS, 2016, vol. 119, no. 9, pp. E112-1161; Juillerat, A. et al., Sci. Rep. 2016, 6: 18950; Roybal, Cell, 2016, vol. 164, pp. 1-10; and Morsut, Cell, 2016, vol. 164, pp. 1-12).

[0279] One drawback of the FKBP/Shield-1 is that Shield-1 is a novel drug whose biodistribution is not fully characterized and it is not known to what extent Shield-1 crosses the blood-brain barrier.

[0280] Other DD ligand pairs include estrogen receptor domains which can be regulated by several estrogen receptor antagonists (Miyazaki et al., J Am Chem. Soc., 2012, 134(9): 3942-3945), and fluorescent destabilizing domain (FDD) derived from bilirubin-inducible fluorescent protein, UnaG. A FDD and its cognate ligand bilirubin (BR) can induce degradation of a protein fused to the FDD (Navarro et al., ACS Chem Biol., 2016, June 6, Epub). Other known DDs and their applications in protein stability include those described in U.S. Pat. Nos. 8,173,792 and 8,530,636, the contents of which are each incorporated herein by reference in their entirety.

[0281] In an orthogonal approach, the destabilizing domains of the bacterial dihydrofolate reductase (ecDHFR) were explored. (Iwamoto et al., Chem Biol. 2010, 17(9):981-988; and Tai et al., PLoS One. 2012, 7(9): e46269). Numerous inhibitors of DHFR have been developed as drugs and one such inhibitor Trimethoprim (TMP), inhibits ecDHFR much more potently than mammalian DHFR providing specificity to the interaction. Additionally, TMP is commercially available and has desirable pharmacological properties making this protein-ligand pair ideal for development for use as a biocircuit (Iwamoto, et al., Chem Biol. (2010) September 24; 17(9): 981-988).

[0282] The present invention expands upon the technology of tuning protein stability using novel destabilizing domains derived from hDHFR. The destabilization and stabilization of a protein of interest, e.g., a transgene for gene therapy, can be controlled by hDHFR mutant DDs having destabilizing or stabilizing properties and their ligands, e.g. Trimethoprim and Methotrexate specifically binding to such protein domains. The presence and/or absence of a small molecule ligand can tune the activity of a protein of interest that is genetically fused to the destabilizing domain.

[0283] Cancer immunotherapy aims' at the induction or restoration of the reactivity of the immune system towards cancer. Significant advances in immunotherapy research have led to the development of various strategies which may broadly be classified into active immunotherapy and passive immunotherapy. In general, these strategies may be utilized to directly kill cancer cells or to counter the immunosuppressive tumor microenvironment. Active immunotherapy aims at induction of an endogenous, long-lasting tumor-antigen specific immune response. The response can further be enhanced by non-specific stimulation of immune response modifiers such as cytokines. In contrast, passive immunotherapy includes approaches where immune effector molecules such as tumor-antigen specific cytotoxic T cells or antibodies are administered to the host. This approach is short lived and requires multiple applications.

[0284] Despite significant advances, the efficacy of current immunotherapy strategies is limited by associated toxicities. These are often related to the narrow therapeutic window associated with immunotherapy, which in part, emerges from the need to push therapy dose to the edge of potentially fatal toxicity to get a clinically meaningful treatment effect. Further, dose expands in vivo since adoptively transferred immune cells continue to proliferate within the patient, often unpredictably.

[0285] A major risk involved in immunotherapy is the on-target but off tumor side effects resulting from T-cell activation in response to normal tissue expression of the tumor associated antigen (TAA). Clinical trials utilizing T cells expressing T-cell receptor against specific TAA reported skin rash, colitis and hearing loss in response to immunotherapy.

[0286] Immunotherapy may also produce on target, on-tumor toxicities that emerge when tumor cells are killed in response to the immunotherapy. The adverse effects include tumor lysis syndrome, cytokine release syndrome and the related macrophage activation syndrome. Importantly, these adverse effects may occur during the destruction of tumors, and thus even a successful on-tumor immunotherapy might result in toxicity. Approaches to regulatably control immunotherapy are thus highly desirable since they have the potential to reduce toxicity and maximize efficacy.

[0287] The present invention provides systems, compositions, immunotherapeutic agents and methods for cancer immunotherapy. These compositions provide tunable regulation of gene expression and function in immunotherapy. The present invention also provides biocircuit systems, effector modules, stimulus response elements (SREs) and payloads, as well as polynucleotides encoding any of the foregoing. In one aspect, the systems, compositions, immunotherapeutic agents and other components of the invention can be controlled by a separately added stimulus, which provides a significant flexibility to regulate cancer immunotherapy. Further, the systems, compositions and the methods of the present invention may also be combined with therapeutic agents such as chemotherapeutic agents, small molecules, gene therapy, and antibodies.

[0288] The tunable nature of the systems and compositions of the invention has the potential to improve the potency and duration of the efficacy of immunotherapies. Reversibly silencing the biological activity of adoptively transferred cells using compositions of the present invention allows maximizing the potential of cell therapy without irretrievably killing and terminating the therapy.

[0289] The present invention provides methods for fine tuning of immunotherapy after administration to patients. This in turn improves the safety and efficacy of immunotherapy and increases the subject population that may benefit from immunotherapy.

### II. COMPOSITIONS OF THE INVENTION

[0290] According to the present invention, biocircuit systems are provided which comprise, at their core, at least one effector module system. Such effector module systems comprise at least one effector module having associated, or integral therewith, one or more stimulus response elements (SREs). The overall architecture of a biocircuit system of the invention is illustrated in FIG. 1. In general, a stimulus response element (SRE) may be operably linked to a payload construct which could be any protein of interest (POI) (e.g., an immunotherapeutic agent), to form an effector module. The SRE, when activated by a particular stimulus, e.g., a small molecule, can produce a signal or outcome, to regulate transcription and/or protein levels of the linked payload either up or down by perpetuating a stabilizing signal or destabilizing signal, or any other types of regulation. A much-detailed description of a biocircuit system can be found in U.S. Provisional Patent Application No. 62/320,864 filed Apr. 11, 2016 or in U.S. Provisional Application No. 62/466,596 filed Mar. 3, 2017 and the International Publication WO2017/180587 (the contents of each of which are herein incorporated by reference in their entirety). In accordance with the present invention, biocircuit systems, effector modules, SREs and components that tune expression levels and activities of any agents used for immunotherapy are provided.

[0291] According to the present invention, biocircuit systems are provided which comprise, at their core, at least one effector module system. Such effector module systems comprise at least one effector module having associated, or integral therewith, one or more stimulus response elements (SREs). The overall architecture of a biocircuit system of the invention is illustrated in FIG. 1. In general, a stimulus response element (SRE) may be operably linked to a payload construct which could be any protein of interest (POI) (e.g., an immunotherapeutic agent), to form an effector module. The SRE, when activated by a particular stimulus, e.g., a small molecule, can produce a signal or outcome, to regulate transcription and/or protein levels of the linked payload either up or down by perpetuating a stabilizing signal or destabilizing signal, or any other types of regulation. A much-detailed description of a biocircuit system are taught in co-owned U.S. Provisional Patent Application No. 62/320,864 filed Apr. 11, 2016, 62/466,596 filed Mar. 3, 2017 and the International Publication WO2017/180587 (the contents each of which are herein incorporated by reference in their entirety). In accordance with the present invention, biocircuit systems, effector modules, SREs and components that tune expression levels and activities of any agents used for immunotherapy are provided.

[0292] As used herein, a “biocircuit” or “biocircuit system” is defined as a circuit within or useful in biologic systems comprising a stimulus and at least one effector module responsive to a stimulus, where the response to the stimulus produces at least one signal or outcome within, between, as an indicator of, or on a biologic system. Biologic systems are generally understood to be any cell, tissue, organ, organ system or organism, whether animal, plant, fungi, bacterial, or viral. It is also understood that biocircuits may be artificial circuits which employ the stimuli or effector modules taught by the present invention and effect signals or outcomes in acellular environments such as with diagnostic, reporter systems, devices, assays or kits. The artificial circuits may be associated with one or more electronic, magnetic, or radioactive components or parts.

[0293] In accordance with the present invention, a biocircuit system may be a destabilizing domain (DD) biocircuit system, a dimerization biocircuit system, a receptor biocircuit system, and a cell biocircuit system. Any of these systems may act as a signal to any other of these biocircuit systems.

### Effector Modules and SREs for Immunotherapy

[0294] In accordance with the present invention, biocircuit systems, effector modules, SREs, and components that tune expression levels and activities of any agents used for immunotherapy are provided. As non-limiting examples, an immunotherapeutic agent may be an antibody and fragments and variants thereof, a cancer specific T cell receptor (TCR) and variants thereof, an anti-tumor specific chimeric antigen receptor (CAR), a chimeric switch receptor, an inhibitor of a co-inhibitory receptor or ligand, an agonist of a co-stimulatory receptor and ligand, a cytokine, chemokine, a cytokine receptor, a chemokine receptor, a soluble growth factor, a metabolic factor, a suicide gene, a homing receptor, or any agent that induces an immune response in a cell and a subject.

[0295] As stated, the biocircuits of the invention include at least one effector module as a component of an effector module system. As used herein, an “effector module” is a single or multi-component construct or complex comprising at least (a) one or more stimulus response elements (i.e. proteins of interest (POIs). As used herein a “stimulus response element (SRE)” is a component of an effector module which is joined, attached, linked to or associated with one or more payloads of the effector module and in some instances, is responsible for the responsive nature of the effector module to one or more stimuli. As used herein, the “responsive” nature of an SRE to a stimulus may be characterized by a covalent or non-covalent interaction, a direct or indirect association or a structural or chemical reaction to the stimulus. Further, the response of any SRE to a stimulus may be a matter of degree or kind. The response may be a partial response. The response may be a reversible response. The response may ultimately lead to a regulated signal or output. Such output signal may be of a relative nature to the stimulus, e.g., producing a modulatory effect of between 1% and 100% or a factored increase or decrease such as 2-fold, 3-fold, 4-fold, 5-fold, 10-fold or more.

[0296] In some embodiments, the present invention provides methods for modulating protein expression, function or level. In some aspects, the modulation of protein expression, function or level refers to modulation of expression, function or level by at least about 20%, such as by at least about 30%, 40%, 50%, 60%, 70%, 80%, 85%, 90%, 95% and 100%, or at least 20-30%, 20-40%, 20-50%, 20-60%, 20-70%, 20-80%, 20-90%, 20-95%, 20-100%, 30-40%, 30-50%, 30-60%, 30-70%, 30-80%, 30-90%, 30-95%, 30-100%, 40-50%, 40-60%, 40-70%, 40-80%, 40-90%, 40-95%, 40-100%, 50-60%, 50-70%, 50-80%, 50-90%, 50-95%, 50-100%, 60-70%, 60-80%, 60-90%, 60-95%, 60-100%, 70-80%, 70-90%, 70-95%, 70-100%, 80-90%, 80-95%, 80-100%, 90-95%, 90-100% or 95-100%.

[0297] In some embodiments, the present invention provides methods for modulating protein, expression, function or level by measuring the stabilization ratio and destabilization ratio. As used herein, the stabilization ratio may be defined as the ratio of expression, function or level of a protein of interest in response to the stimulus to the expression, function or level of the protein of interest in the absence of the stimulus specific to the SRE. In some aspects, the stabilization ratio is at least 1, such as by at least 1-10, 1-20, 1-30, 1-40, 1-50, 1-60, 1-70, 1-80, 1-90, 1-100, 20-30, 20-40, 20-50, 20-60, 20-70, 20-80, 20-90, 20-95, 20-100, 30-40, 30-50, 30-60, 30-70, 30-80, 30-90, 30-95, 30-100, 40-50, 40-60, 40-70, 40-80, 40-90, 40-95, 40-100, 50-60, 50-70, 50-80, 50-90, 50-95, 50-100, 60-70, 60-80, 60-90, 60-95, 60-100, 70-80, 70-90, 70-95, 70-100, 80-90, 80-95, 80-100, 90-95, 90-100 or 95-100. As used herein, the destabilization ratio may be defined as the ratio of expression, function or level of a protein of interest in the absence of the stimulus specific to the effector module to the expression, function or level of the protein of interest, that is expressed constitutively and in the absence of the stimulus specific to the SRE. As used herein “constitutively” refers to the expression, function or level of a protein of interest that is not linked to an SRE, and is therefore expressed both in the presence and absence of the stimulus. In some aspects, the destabilization ratio is at least 0, such as by at least 0.1, 0.2, 0.3, 0.4, 0.5, 0.6, 0.7, 0.8, 0.9, or at least, 0-0.1, 0-0.2, 0-0.3, 0-0.4, 0-0.5, 0-0.6, 0-0.7, 0-0.8, 0-0.9, 0.1-0.2, 0.1-0.3, 0.1-0.4, 0.1-0.5, 0.1-0.6, 0.1-0.7, 0.1-0.8, 0.1-0.9, 0.2-0.3, 0.2-0.4, 0.2-0.5, 0.2-0.6, 0.2-0.7, 0.2-0.8, 0.2-0.9, 0.3-0.4, 0.3-0.5, 0.3-0.6, 0.3-0.7, 0.3-0.8, 0.3-0.9, 0.4-0.5, 0.4-0.6, 0.4-0.7, 0.4-0.8, 0.4-0.9, 0.5-0.6, 0.5-0.7, 0.5-0.8, 0.5-0.9, 0.6-0.7, 0.6-0.8, 0.6-0.9, 0.7-0.8, 0.7-0.9 or 0.8-0.9.

[0298] In some embodiments, the stimulus of the present invention maybe ultrasound stimulation. In some embodiments, the SREs of the present invention may derived from mechanosensitive proteins. In one embodiment, the SRE of the present invention may be the mechanically sensitive ion channel, Piezol.

[0299] Expression of the payload of interest in such instances is tuned by providing focused ultrasound stimulation. In other embodiments, the SREs of the present invention may be derived from calcium biosensors, and the stimulus of the present invention may calcium. The calcium may be generated by the ultrasound induced mechanical stimulation of mechanosensitive ion channels. The ultrasound activation of the ion channel causes a calcium influx thereby generating the stimulus. In one embodiment, the mechanosensitive ion channel is Piezo 1. Mechanosensors may be advantageous to use since they provide spatial control to a specific location in the body.

[0300] The SRE of the effector module may be selected from, but is not limited to, a peptide, peptide complex, peptide-protein complex, protein, fusion protein, protein complex, protein-protein complex. The SRE may comprise one or more regions derived from any natural or mutated protein, or antibody. In this aspect, the SRE is an element, when responding to a stimulus, can tune intracellular localization, intramolecular activation, and/or degradation of payloads.

[0301] In some embodiments, effector modules of the present invention may comprise additional features that facilitate the expression and regulation of the effector module, such as one or more signal sequences (SSs), one or more cleavage and/or processing sites, one or more targeting and/or penetrating peptides, one or more tags, and/or one or more linkers. Additionally, effector modules of the present invention may further comprise other regulatory moieties such as inducible promoters, enhancer sequences, microRNA sites, and/or microRNA targeting sites. Each aspect or tuned modality may bring to the effector module or biocircuit a differentially tuned feature. For example, an SRE may represent a destabilizing domain, while mutations in the protein payload may alter its cleavage sites or dimerization properties or half-life and the inclusion of one or more microRNA or microRNA binding site may impart cellular detargeting or trafficking features. Consequently, the present invention embraces biocircuits which are multifactorial in their tenability. Such biocircuits may be engineered to contain one, two, three, four or more tuned features.

[0302] In some embodiments, effector modules of the present invention may include one or more degrons to tune expression. As used herein, a “degron” refers to a minimal sequence within a protein that is sufficient for the recognition and the degradation by the proteolytic system. An important property of degrons is that they are transferrable, that is, appending a degron to a sequence confers degradation upon the sequence. In some embodiments, the degron may be appended to the destabilizing domains, the payload or both. Incorporation of the degron within the effector module of the invention, confers additional protein instability to the effector module and may be used to minimize basal expression. In some embodiments, the degron may be an N-degron, a phospho degron, a heat inducible degron, a photosensitive degron, an oxygen dependent degron. As a non-limiting example, the degron may be an Ornithine decarboxylase degron as described by Takeuchi et al. (Takeuchi J et al. (2008). Biochem J. 2008 Mar. 1; 410(2):401-7; the contents of which are incorporated by reference in their entirety). Other examples of degrons useful in the present invention include degrons described in International patent publication Nos. WO2017004022, WO2016210343, and WO2011062962; the contents of each of which are incorporated by reference in their entirety.

[0303] A variety of strategies that can directly control protein, e.g., a transgene, expression and function are available. The present invention provides novel protein domains displaying small molecule dependent stability. Such protein domains are called destabilizing domains (DDs). In the absence of its binding ligand, the DD causes degradation of a payload such as a protein of interest (POI) that is operably linked to the DD, while in the presence of its binding ligand, the fused DD and payload can be stabilized and its stability is dose dependent.

[0304] According to the present invention, novel destabilizing domains derived from human DHFR (Dihydrofolate reductase) protein are provided, including single mutation: hDHFR (Y122I), hDHFR (K81R), hDHFR (F59S), hDHFR (I17V), hDHFR (N65D), hDHFR (A107V), hDHFR (N127Y), hDHFR (K185E), hDHFR (N186D), and hDHFR (M140I); double mutations: hDHFR (M53T, R138I), hDHFR (V75F, Y122I), hDHFR (A125F, Y122I), hDHFR (L74N, Y122I), hDHFR (L94A, T147A), hDHFR (G21T, Y122I), hDHFR (V121A, Y122I), hDHFR (Q36K, Y122I), hDHFR (C7R, Y163C), hDHFR (Y178H, E181G), hDHFR (A10V, H88Y), hDHFR (T137R, F143L), hDHFR (E162G, I176F), hDHFR (T57A, I72A), hDHFR (H131R, E144G), and hDHFR (Y183H, K185E); and triple mutations: hDHFR (Q36F, N65F, Y122I), hDHFR (G21E, I72V, I176T), hDHFR (I8V, K133E, Y163C), hDHFR (V9A, S93R, P150L), hDHFR (K19E, F89L, E181G), hDHFR (G54R, M140V, S168C), hDHFR (L23S, V121A, Y157C), hDHFR (V110A, V136M, K177R), and hDHFR (N49D, F59S, D153G). These hDHFR DDs can bind to MTX and/or TMP and be stabilized in a dose dependent matter.

[0305] According to the present invention, biocircuit systems are provided which comprise, at their core, at least one effector module system. Such effector module systems comprise at least one effector module having associated, or integral therewith, one or more stimulus response elements (SREs). The overall architecture of a biocircuit system of the invention is illustrated in FIG. 1. In particular, biocircuit systems and effector modules comprising the novel destabilizing domains discussed herein are provided. In some embodiments, the SRE is hDHFR-derived SRE. In some embodiments, the effector module described herein may be a hDHFR-derived SRE operably linked to a payload.

[0306] As used herein, a “biocircuit” or “biocircuit system” is defined as a circuit within or useful in biologic systems comprising a stimulus and at least one effector module responsive to a stimulus, where the response to the stimulus produces at least one signal or outcome within, between, as an indicator of, or on a biologic system. Biologic systems are generally understood to be any cell, tissue, organ, organ system or organism, whether animal, plant, fungi, bacterial, or viral. It is also understood that biocircuits may be artificial circuits which employ the stimuli or effector modules taught by the present invention and effect signals or outcomes in acellular environments such as with diagnostic, reporter systems, devices, assays or kits. The artificial circuits may be associated with one or more electronic, magnetic, or radioactive components or parts. A much-detailed description of a biocircuit system can be found in International Publication No. WO2017180587 (the contents of which are herein incorporated by reference in their entirety).

[0307] In one aspect of the present invention, the biocircuit system is a DD biocircuit system.

[0308] As used herein, an “effector module” is a single or multi-component construct or complex comprising at least (a) one or more stimulus response elements (SREs) and (b) one or more payloads (i.e. proteins of interest (POIs). In the context of the present invention, the SRE is a DD.

[0309] As used herein a “payload” or “target payload” is defined as any protein or nucleic acid whose function is to be altered. Payloads may include any coding or non-coding gene or any protein or fragment thereof, or fusion constructs, or antibodies.

[0310] Payloads are often associated with one or more SREs (e.g., DDs) and may be encoded alone or in combination with one or more DD in a polynucleotide of the invention. Payloads themselves may be altered (at the protein or nucleic acid level) thereby providing for an added layer of tenability of the effector module. For example, payloads may be engineered or designed to contain mutations, single or multiple, which affect the stability of the payload or its susceptibility to degradation, cleavage or trafficking. The combination of a DD which can have a spectrum of responses to a stimulus with a payload which is altered to exhibit a variety of responses or gradations of output signals, e.g., expression levels, produce biocircuits which are superior to those in the art. For example, mutations or substitutional designs such as those created for IL12 in WO2016048903 (specifically in Example 1 therein), the contents of which are incorporated herein by reference in their entirety, may be used in any protein payload in conjunction with a DD of the present invention to create dual tunable biocircuits. The ability to independently tune both the DD and the payload greatly increases the scope of uses of the effector modules of the present invention.

[0311] Effector modules may be designed to include one or more payloads, one or more DDs, one or more cleavage sites, one or more signal sequences, one or more tags, one or more targeting peptides, and one or more additional features including the presence or absence of one or more linkers. Representative effector module embodiments of the invention are illustrated in FIG. 2-FIG. 6. In some aspects, the DD can be positioned at the N-terminal end, or the C-terminal end, or internal of the effector module construct. Different components of an effector module such as DDs, payloads and additional features are organized linearly in one construct, or are separately constructed in separate constructs.

[0312] Additionally, effector modules of the present invention may further comprise other regulatory moieties such as inducible promoters, enhancer sequences, microRNA sites, and/or microRNA targeting sites that provide flexibility on controlling the activity of the payload. The payloads of the present invention may be any natural proteins and their variants, or fusion polypeptides, antibodies and variants thereof, transgenes and therapeutic agents.

[0313] The stimulus of the biocircuit system may be, but is not limited to, a ligand, a small molecule, an environmental signal (e.g., pH, temperature, light and subcellular location), a peptide or a metabolite. In one aspect of the present invention, the stimulus is a DHFR DD binding ligand including methotrexate (MTX) and trimethoprim (TMP).

[0314] Polypeptides of DDs, biocircuit systems and effector modules comprising such DDs and payload constructs, other components, polynucleotides encoding these polypeptides and variants thereof, vectors comprising these polynucleotides, are provided in the present invention. The vector may be a plasmid or a viral vector including but not limited to a lentiviral vector, a retroviral vector, a recombinant AAV vector and oncolytic viral vector.

[0315] According to the present invention, biocircuit systems and effector modules of the invention can be used to regulate the expression and activity of a payload in response to the presence or absence of a ligand that specifically binds to the DD integrated within the biocircuit system and effector module.

[0316] In some aspects, DDs, effector modules and biocircuit systems of the invention may be used to regulate the expression, function and activity of a payload in a cell or a subject. The regulation refers to a lever of change of its expression, function and activity, by at least about 10%, or at least about 20%, or at least about 30%, or at least about 40%, or at least about 50%, or at least about 60%, or at least about 70%, or at least about 80%, or at least about 85%, or at least about 90%, or at least about 95%, or at least about 100%, or at least 20-30%, 20-40%, 20-50%, 20-60%, 20-70%, 20-80%, 20-90%, 20-95%, 20-100%, 30-40%, 30-50%, 30-60%, 30-70%, 30-80%, 30-90%, 30-95%, 30-100%, 40-50%, 40-60%, 40-70%, 40-80%, 40-90%, 40-95%, 40-100%, 50-60%, 50-70%, 50-80%, 50-90%, 50-95%, 50-100%, 60-70%, 60-80%, 60-90%, 60-95%, 60-100%, 70-80%, 70-90%, 70-95%, 70-100%, 80-90%, 80-95%, 80-100%, 90-95%, 90-100% or 95-100%.

[0317] In some embodiments, the present invention provides methods for modulating protein, expression, function or level by measuring the stabilization ratio, destabilization ratio, and destabilizing mutation co-efficient. As used herein, the stabilization ratio may be defined as the ratio of expression, function or level of a protein of interest in response to the stimulus to the expression, function or level of the protein of interest in the absence of the stimulus specific to the SRE. In some aspects, the stabilization ratio is at least 1, such as by at least 1-10, 1-20, 1-30, 1-40, 1-50, 1-60, 1-70, 1-80, 1-90, 1-100, 20-30, 20-40, 20-50, 20-60, 20-70, 20-80, 20-90, 20-95, 20-100, 30-40, 30-50, 30-60, 30-70, 30-80, 30-90, 30-95, 30-100, 40-50, 40-60, 40-70, 40-80, 40-90, 40-95, 40-100, 50-60, 50-70, 50-80, 50-90, 50-95, 50-100, 60-70, 60-80, 60-90, 60-95, 60-100, 70-80, 70-90, 70-95, 70-100, 80-90, 80-95, 80-100, 90-95, 90-100 or 95-100. As used herein, the destabilization ratio may be defined as the ratio of expression, function or level of a protein of interest in the absence of the stimulus specific to the effector module to the expression, function or level of the protein of interest, that is expressed constitutively and in the absence of the stimulus specific to the SRE. As used herein “constitutively” refers to the expression, function or level a protein of interest that is not linked to an SRE or is linked to the wildtype protein from which the SRE is derived, and is therefore expressed both in the presence and absence of the stimulus. As used herein, the destabilizing mutation co-efficient may be defined as the ratio of expression or level of a protein of interest that is appended to a DD, in the absence of the stimulus specific to the effector module to the expression, function or level of the protein that is appended to the wild type protein from which the DD is derived. In some aspects, the destabilization ratio and the destabilizing mutation co-efficient is at least 0, such as by at least 0.1, 0.2, 0.3, 0.4, 0.5, 0.6, 0.7, 0.8, 0.9, or at least, 0-0.1, 0-0.2, 0-0.3, 0-0.4, 0-0.5, 0-0.6, 0-0.7, 0-0.8, 0-0.9, 0.1-0.2, 0.1-0.3, 0.1-0.4, 0.1-0.5, 0.1-0.6, 0.1-0.7, 0.1-0.8, 0.1-0.9, 0.2-0.3, 0.2-0.4, 0.2-0.5, 0.2-0.6, 0.2-0.7, 0.2-0.8, 0.2-0.9, 0.3-0.4, 0.3-0.5, 0.3-0.6, 0.3-0.7, 0.3-0.8, 0.3-0.9, 0.4-0.5, 0.4-0.6, 0.4-0.7, 0.4-0.8, 0.4-0.9, 0.5-0.6, 0.5-0.7, 0.5-0.8, 0.5-0.9, 0.6-0.7, 0.6-0.8, 0.6-0.9, 0.7-0.8, 0.7-0.9 or 0.8-0.9.

[0318] The position of the payload with respect to the DD, within the SRE may be varied to achieve optimal DD regulation. In some embodiments, the payload may be fused to the N terminus of the DD. In another embodiment, the payload may be fused to the C terminus of the DDs. An optional start codon nucleotide sequence encoding for methionine may be added to the DD and/or payload. In some embodiments, effector modules of the present invention may include one or more degrons to tune expression. As used herein, a “degron” refers to a minimal sequence within a protein that is sufficient for the recognition and the degradation by the proteolytic system. An important property of degrons is that they are transferrable, that is, appending a degron to a sequence confers degradation upon the sequence. In some embodiments, the degron may be appended to the destabilizing domains, the payload or both. Incorporation of the degron within the effector module of the invention, confers additional protein instability to the effector module and may be used to minimize basal expression. In some embodiments, the degron may be an N-degron, a phospho degron, a heat inducible degron, a photosensitive degron, an oxygen dependent degron. As a non-limiting example, the degron may be an Ornithine decarboxylase degron as described by Takeuchi et al. (Takeuchi J et al. (2008). Biochem J. 2008 Mar. 1; 410(2):401-7; the contents of which are incorporated by reference in their entirety). Other examples of degrons useful in the present invention include degrons described in International patent publication Nos. WO2017004022, WO2016210343, and WO2011062962; the contents of each of which are incorporated by reference in their entirety.

[0319] In some embodiments, more than one biocircuit system may be used in combination to control various protein functions in the same cell or organism, each of which uses different DD and ligand pair and can be regulated separately.

[0320] As shown in FIG. 2, representative effector module embodiments comprising one payload, i.e. one immunotherapeutic agent are illustrated. Each components of the effector module may be located or positioned in various arrangements without (A to F) or with (G to Z, and AA to DD) a cleavage site. An optional linker may be inserted between each component of the effector module.

[0321] FIG. 3-FIG. 6 illustrate representative effector module embodiments comprising two payloads, i.e. two immunotherapeutic agents. In some aspects, more than two immunotherapeutic agents (payloads) may be included in the effector module under the regulation of the same SRE (e.g., the same DD). The two or more agents may be either directly linked to each other or separated (FIG. 3). The SRE may be positioned at the N-terminus of the construct, or the C-terminus of the construct, or in the internal location.

[0322] In some aspects, the two or more immunotherapeutic agents may be as represented in given in FIG. 7-FIG. 12.

[0323] In some aspects, the two or more immunotherapeutic agents may be the same type. Biocircuits and components utilizing such effector molecules are given in FIG. 7-FIG. 12.

[0324] In some aspects, the two or more immunotherapeutic agents may be the same type such as two antibodies, or different types such as a CAR construct and a cytokine IL12. Biocircuits and components utilizing such effector molecules are given in FIG. 7-FIG. 12.

[0325] In some embodiments, biocircuits of the invention may be modified to reduce their immunogenicity. Immunogenicity is the result of a complex series of responses to a substance that is perceived as foreign and may include the production of neutralizing and non-neutralizing antibodies, formation of immune complexes, complement activation, mast cell activation, inflammation, hypersensitivity responses, and anaphylaxis. Several factors can contribute to protein immunogenicity, including, but not limited to protein sequence, route and frequency of administration and patient population. In a preferred embodiment, protein engineering may be used to reduce the immunogenicity of the compositions of the invention. In some embodiments, modifications to reduce immunogenicity may include modifications that reduce binding of the processed peptides derived from the parent sequence to MHC proteins. For example, amino acid modifications may be engineered such that there are no or a minimal of number of immune epitopes that are predicted to bind with high affinity, to any prevalent MHC alleles. Several methods of identifying MHC binding epitopes of known protein sequences are known in the art and may be used to score epitopes in the compositions of the present invention. Such methods are disclosed in US Patent Publication No. US 20020119492, US20040230380, and US 20060148009; the contents of each of which are incorporated by reference in their entirety.

[0326] In some embodiments, biocircuits of the invention may be modified to reduce their immunogenicity. Immunogenicity is the result of a complex series of responses to a substance that is perceived as foreign and may include the production of neutralizing and non-neutralizing antibodies, formation of immune complexes, complement activation, mast cell activation, inflammation, hypersensitivity responses, and anaphylaxis. Several factors can contribute to protein immunogenicity, including, but not limited to protein sequence, route and frequency of administration and patient population. In a preferred embodiment, compositions of the invention may be engineered to reduce the immunogenicity of the compositions of the invention. In some embodiments, modifications to reduce immunogenicity may include modifications that reduce binding of the processed peptides derived from the parent sequence to major histocompatibility complex (MHC) proteins. For example, amino acid modifications may be engineered such that the minimum number of immune epitopes are available to bind with high affinity to any prevalent MHC alleles. Several methods of identifying MHC binding epitopes of known protein sequences are known in the art and may be useful in the present invention. Such methods are disclosed in US Patent Publication No. US 20020119492, US20040230380, and US 20060148009; the contents of each of which are incorporated by reference in their entirety.

[0327] Epitope identification and subsequent sequence modification may be applied to reduce immunogenicity. The identification of immunogenic epitopes may be achieved either physically or computationally. Physical methods of epitope identification may include, for example, mass spectrometry and tissue culture/cellular techniques. Computational approaches that utilize information obtained on antigen processing, loading and display, structural and/or proteomic data toward identifying non-self-peptides that may result from antigen processing, and that are likely to have good binding characteristics in the groove of the MHC may also be utilized. One or more mutations may be introduced into the biocircuits of the invention directing the expression of the protein, to maintain its functionality while simultaneously rendering the identified epitope less or non-immunogenic.

[0328] In some embodiments, the endoplasmic reticulum associated degradation (ERAD) pathway may be used to optimize degradation of the payloads described herein e.g. secreted and membrane cargos. In one embodiment, the effector modules of the invention may directed to the ER E3 ligases by using adaptor proteins or protein domains. The endoplasmic reticulum is endowed with a specialized machinery to ensure proteins deployed to the distal secretory pathway are correctly folded and assembled into native oligomeric complexes. Proteins failing to meet this conformational standard are degraded by the ERAD pathway, a process through which folding defective proteins are selected and ultimately degraded by the ubiquitin proteasome system. ERAD proceeds through four main steps involving substrate selection, dislocation across the ER membrane, covalent conjugation with polyubiquitin, and proteasome degradation. Any of these steps may be modulated to optimize the degradation of the payloads and the effector modules described herein. Protein adaptors within the ER membrane, link substrate recognition to the ERAD machinery (herein referred to as the “dislocon”), which causes the dislocation of the proteins from the ER. Non-limiting examples of protein adaptors that may be used to optimize ERAD pathway degradation include, but are not limited to SEL1L (an adaptor that links glycan recognition to the dislocon), Erlins (intermembrane substrate adaptors), Insigs (client specific adaptors), F-Box proteins (act as adaptors for dislocated glycoproteins in the cytoplasm) and viral-encoded adaptors.

[0329] In some embodiments, protein modifications engineered into the structure of the compositions of the invention to interfere with antigen processing and peptide loading such as glycosylation and PEGylation, may also be useful in the present invention. Compositions of the invention may also be engineered to include non-classical amino acid sidechains to design less immunogenic compositions. Any of the methods discussed in International Patent Publication No. WO2005051975 for reducing immunogenicity may be useful in the present invention (the contents of which are incorporated by reference in their entirety).

[0330] In one embodiment, patients may also be stratified according to the immunogenic peptides presented by their immune cells and may be utilized as a parameter to determine suitable patient cohorts that may therapeutically benefit for the compositions of the invention.

[0331] In some embodiments, reduced immunogenicity may be achieved by limiting immunoproteasome processing. The proteasome is an important cellular protease that is found in two forms: the constitutive proteasome, which is expressed in all cell types and which contains active e.g. catalytic subunits and the immunoproteasome that is expressed in cell of the hematopoietic lineage, and which contains different active subunits termed low molecular weight proteins (LMP) namely LMP-2, LMP-7 and LMP-10. Immunoproteasomes exhibit altered peptidase activities and cleavage site preferences that result in more efficient liberation of many MHC class I epitopes. A well described function of the immunoproteasome is to generate peptides with hydrophobic C terminus that can be processed to fit in the groove of MHC class I molecules. Deol P et al. have shown that immunoproteasomes may lead to a frequent cleavage of specific peptide bonds and thereby to a faster appearance of a certain peptide on the surface of the antigen presenting cells; and enhanced peptide quantities (Deol P et al. (2007) J Immunol 178 (12) 7557-7562; the contents of which are incorporated herein reference in its entirety). This study indicates that reduced immunoproteasome processing may be accompanied by reduced immunogenicity. In some embodiments, immunogenicity of the compositions of the invention may be reduced by modifying the sequence encoding the compositions of the invention to prevent immunoproteasome processing. Biocircuits of the present invention may also be combined with immunoproteasome-selective inhibitors to achieve the same effects. Examples of inhibitors useful in the present invention include UK-101 (B1i selective compound), IPSI-001, ONX 0914 (PR-957), and PR-924 (IPSI).

[0332] Another embodiment of the invention provides a method of detecting the presence of cancer in a mammal, comprising: (a) contacting a sample comprising one or more cells from the mammal with any of the CARs, nucleic acids, recombinant expression vectors, host cells, population of cells, or pharmaceutical compositions of the invention, thereby forming a complex, (b) and detecting the complex, wherein detection of the complex is indicative of the presence of cancer in the mammal. The sample may be obtained by any suitable method, e.g., biopsy or necropsy. A biopsy is the removal of tissue and/or cells from an individual. Such removal may be to collect tissue and/or cells from the individual in order to perform experimentation on the removed tissue and/or cells. This experimentation may also be used to determine if the individual has and/or is suffering from cancer.

[0333] With respect to an embodiment of the inventive method of detecting the presence of cancer in a mammal, the sample comprising cells of the mammal can be a sample comprising whole cells, lysates thereof, or a fraction of the whole cell lysates, e.g., a nuclear or cytoplasmic fraction, a whole protein traction, or a nucleic acid fraction. If the sample comprises whole cells, the cells can be any cells of the mammal, e.g., the cells of any organ or tissue, including tumor cells. The contacting can take place in vitro or in vivo with respect, to the mammal. Preferably, the contacting is in vitro. Also, detection of the complex can occur through any number of ways known in the art. For instance, the inventive CARs, nucleic acids, recombinant expression vectors, host cells, populations of cells, or pharmaceutical compositions described herein can be labeled with a detectable label such as, for instance, a radioisotope, a fluorophore (e.g., fluorescein isothiocyanate (FITC), phycoerythrin (PE)), an enzyme (e.g., alkaline phosphatase, horseradish peroxidase), and element particles (e.g., gold particles). Methods of testing the compositions of the invention for the ability to recognize target cells and for antigen specificity are known in the art. For instance, Clay et al, J. Immunol, 163: 507-51 3 (1999), teaches methods of measuring the release of cytokines (e.g., interferon-γ, granulocyte/monocyte colony stimulating factor (GM-CSF), tumor necrosis factor a (TNF-a) or interleukin 2 (IL2)). In addition, anti-CD276 material function can be evaluated by measurement of cellular cytotoxicity, as described in Zhao et al., J. Immunol, 1 74: 44) 5-4423 (2005).

[0334] In some embodiments, the stimulus of the present invention maybe ultrasound stimulation. In some embodiments, the SREs of the present invention may derived from mechanosensitive proteins. In one embodiment, the SRE of the present invention may be the mechanically sensitive ion channel, Piezol.

[0335] Expression of the payload of interest in such instances is tuned by providing focused ultrasound stimulation. In other embodiments, the SREs of the present invention may be derived from calcium biosensors, and the stimulus of the present invention may calcium. The calcium may be generated by the ultrasound induced mechanical stimulation of mechanosensitive ion channels. The ultrasound activation of the ion channel causes a calcium influx thereby generating the stimulus. In one embodiment, the mechanosensitive ion channel is Piezo 1. Mechanosensors may be advantageous to use since they provide spatial control to a specific location in the body.

### Destabilizing Domains (DDs)

[0336] As used herein, the term “destabilizing domains (DDs)” refers to protein domains that are unstable and degraded in the absence of ligand, but whose stability is rescued by binding to a high affinity cell-permeable ligand. Destabilizing domains (DDs) can be appended to a target protein of interest (POI) and can convey its destabilizing property to the protein of interest, causing protein degradation. The presence, absence or an amount of a small molecule ligand that binds to or interacts with the DD, can, upon such binding or interaction modulate the stability of the payload(s) and consequently the function of the payload. A protein domain with destabilizing property (e.g. a DD) is used in conjunction with a cell-permeable ligand to regulate any protein of interest when it is fused with the destabilizing domain. DDs render the attached protein of interest unstable in the absence of a DD-binding ligand such that the protein is rapidly degraded by the ubiquitin-proteasome system of the cell. However, when a specific small molecule ligand binds its intended DD as a ligand binding partner, the instability is reversed and protein function is restored. The conditional nature of DD stability allows a rapid and non-perturbing switch from stable protein to unstable substrate for degradation. Moreover, its dependency on the concentration of its ligand further provides tunable control of degradation rates. Depending on the degree of binding and/or interaction the altered function of the payload may vary, hence providing a “tuning” of the payload function.

[0337] Due to its reversibility, specificity and the fast and easy regulation on protein level, the post-transcriptional tuning system provides a useful system for gene regulation. Furthermore, the regulation may be dose-dependent, thereby altering the protein-turnover rate to transform a short-lived or no detectable protein into a protein that functions for a precisely controlled period of time (Iwamoto et al., Chem. Biol. 2010, 17: 981-988).

[0338] In some embodiments, the desired characteristics of the DDs may include, but are not limited to, low protein levels in the absence of a ligand of the DD (i.e. low basal stability), large dynamic range, robust and predictable dose-response behavior, and rapid kinetics of degradation. Candidate DDs that bind to a desired ligand but not endogenous molecules may be preferred.

[0339] Candidate destabilizing domain sequence identified from protein domains of known wildtype proteins (as a template) may be mutated to generate libraries of mutants based on the template candidate domain sequence. Mutagenesis strategies used to generate DD libraries may include site-directed mutagenesis e.g. by using structure guided information, or random mutagenesis e.g. using error-prone PCR, or a combination of both. In some embodiments, destabilizing domains identified using random mutagenesis may be used to identify structural properties of the candidate DDs that may be required for destabilization, which may then be used to further generate libraries of mutations using site directed mutagenesis.

[0340] In some embodiments, novel DDs may be identified by mutating one or more amino acids in the candidate destabilizing domain to an amino acid that is vicinal to the mutation site. As used herein a vicinal amino acid refers to an amino acid that is located 1, 2, 3, 4, 5 or more amino acids upstream or downstream of the mutation site in the linear sequence and/or the crystal structure of the candidate destabilizing domain. In some embodiments, the vicinal amino acid may be a conserved amino acid (with similar physicochemical properties as the amino acid at the mutation site), a semi conserved amino acid (e.g. negatively to positively charge amino acid) or a non-conserved amino acid (with different physicochemical properties than the amino acid at the mutation site).

[0341] In some embodiments, DD mutant libraries may be screened for mutations with altered, preferably higher binding affinity to the ligand, as compared to the wild type protein. DD libraries may also be screened using two or more ligands and DD mutations that are stabilized by some ligands but not others may be preferentially selected. DD mutations that bind preferentially to the ligand compared to a naturally occurring protein may also be selected. Such methods may be used to optimize ligand selection and ligand binding affinity of the DD. Additionally, such approaches can be used to minimize deleterious effects caused by off-target ligand binding.

[0342] In some embodiments, suitable DDs may be identified by screening mutant libraries using barcodes. Such methods may be used to detect, identify and quantify individual mutant clones within the heterogeneous mutant library. Each DD mutant within the library may have distinct barcode sequences (with respect to each other). In other instances, the polynucleotides can also have different barcode sequences with respect to 2, 3, 4, 5, 6, 7, 8, 9, 10 or more nucleic acid bases. Each DD mutant within the library may also comprise a plurality of barcode sequences. When used in plurality barcodes may be used such that each barcode is unique to any other barcode. Alternatively, each barcode used may not be unique, but the combination of barcodes used may create a unique sequence that can be individually tracked. The barcode sequence may be placed upstream of the SRE, downstream of the SRE, or in some instances may be placed within the SRE. DD mutants may be identified by barcodes using sequencing approaches such as Sanger sequencing, and next generation sequencing, but also by polymerase chain reaction and quantitative polymerase chain reaction. In some embodiments, polymerase chain reaction primers that amplify a different size product for each barcode may be used to identify each barcode on an agarose gel. In other instances, each barcode may have a unique quantitative polymerase chain reaction probe sequence that enables targeted amplification of each barcode.

[0343] Inventors of the present invention investigated several human proteins and identified novel human DDs which can confer its instability features to the fused payload and facilitate the rapid degradation of the fusion polypeptide in the absence of its ligand but stabilize the fused payload in response to the binding to its ligand. Specifically, the new DDs are derived from human DHFR protein (hDHFR).

[0344] In some embodiments, biocircuit systems, effector modules, and compositions of the present invention relate to post-translational regulation of protein (payload) function anti-tumor immune responses of immunotherapeutic agents. In one embodiment, the SRE is a stabilizing/destabilizing domain (DD). The presence, absence or an amount of a small molecule ligand that binds to or interacts with the DD, can, upon such binding or interaction modulate the stability of the payload(s) and consequently the function of the payload. Depending on the degree of binding and/or interaction the altered function of the payload may vary, hence providing a “tuning” of the payload function.

[0345] In some embodiments, biocircuit systems, effector modules, and compositions of the present invention relate to post-translational regulation of protein (payload) function, in particular, anti-tumor immune responses of immunotherapeutic agents. In one embodiment, the SRE is a stabilizing/destabilizing domain (DD). The presence, absence or an amount of a small molecule ligand that binds to or interacts with the DD, can, upon such binding or interaction modulate the stability of the payload(s) and consequently the function of the payload. Depending on the degree of binding and/or interaction the altered function of the payload may vary, hence providing a “tuning” of the payload function.

[0346] In some embodiments, destabilizing domains described herein or known in the art may be used as SREs in the biocircuit systems of the present invention in association with any of the immunotherapeutic agents (payloads) taught herein. Destabilizing domains (DDs) are small protein domains that can be appended to a target protein of interest. DDs render the attached protein of interest unstable in the absence of a DD-binding ligand such that the protein is rapidly degraded by the ubiquitin-proteasome system of the cell (Stankunas, K., et al., Mol. Cell, 2003, 12: 1615-1624; Banaszynski, et al., Cell; 2006, 126(5): 995-1004; reviewed in Banaszynski, L. A., and Wandless, T. J. Chem. Biol.; 2006, 13:11-21 and Rakhit R et al., Chem Biol. 2014; 21(9):1238-1252). However, when a specific small molecule ligand binds its intended DD as a ligand binding partner, the instability is reversed and protein function is restored. The conditional nature of DD stability allows a rapid and non-perturbing switch from stable protein to unstable substrate for degradation. Moreover, its dependency on the concentration of its ligand further provides tunable control of degradation rates.

[0347] In some embodiments, the desired characteristics of the DDs may include, but are not limited to, low protein levels in the absence of a ligand of the DD (i.e. low basal stability), large dynamic range, robust and predictable dose-response behavior, and rapid kinetics of degradation. DDs that bind to a desired ligand but not endogenous molecules may be preferred.

[0348] Several protein domains with destabilizing properties and their paired small molecules have been identified and used to control protein expression, including FKBP/shield-1 system (Egeler et al., J Biol. Chem. 2011, 286(36): 32328-31336; the contents of which are incorporated herein by reference in their entirety), ecDHFR and its ligand trimethoprim (TMP); estrogen receptor domains which can be regulated by several estrogen receptor antagonists (Miyazaki et al., J Am Chem. Soc., 2012, 134(9): 3942-3945; the contents of which are incorporated by reference herein in their entirety); and fluorescent destabilizing domain (FDD) derived from bilirubin-inducible fluorescent protein, UnaG and its cognate ligand bilirubin (BR) (Navarro et al., ACS Chem Biol., 2016, June 6; the contents of which are incorporated herein by reference in their entirety).

[0349] Known DDs also include those described in U.S. Pat. Nos. 8,173,792 and 8,530,636, the contents of which are each incorporated herein by reference in their entirety.

[0350] In some embodiments, the DDs of the present invention may be derived from some known sequences that have been approved to be capable of post-translational regulation of proteins. For example, Xiong et al., have demonstrated that the non-catalytic N-terminal domain (54-residues) of ACS7 (1-aminocyclopropane-1-carboxylate synthase) in Arabidopsis, when fused to the β-glucuronidase (GUS) reporter, can significantly decrease the accumulation of the GUS fusion protein (Xiong et al., J. Exp. Bot., 2014, 65(15): 4397-4408). Xiong et al. further demonstrated that both exogenous 1-aminocyclopropane-1-carboxylic acid (ACC) treatment and salt can rescue the levels of accumulation of the ACS N-terminal and GUS fusion protein. The ACS N-terminus mediates the regulation of ACS7 stability through the ubiquitin-26S proteasome pathway.

[0351] Another non-limiting example is the stability control region (SCR, residues 97-118) of Tropomyosin (Tm), which controls protein stability. A destabilizing mutation L110A, and a stabilizing mutation A109L dramatically affect Tropomyosin protein dynamics (Kirwan and Hodges, J. Biol. Chem., 2014, 289: 4356-4366). Such sequences can be screened for ligands that bind them and regulate their stability. The identified sequence and ligand pairs may be used as components of the present invention.

[0352] In some embodiments, the DDs of the present invention may be developed from known proteins. Regions or portions or domains of wild type proteins may be utilized as SREs/DDs in whole or in part. They may be combined or rearranged to create new peptides, proteins, regions or domains of which any may be used as SREs/DDs or the starting point for the design of further SREs and/or DDs.

[0353] Ligands such as small molecules that are well known to bind candidate proteins can be tested for their regulation in protein responses. The small molecules may be clinically approved to be safe and have appropriate pharmaceutical kinetics and distribution. In some embodiments, the stimulus is a ligand of a destabilizing domain (DD), for example, a small molecule that binds a destabilizing domain and stabilizes the POI fused to the destabilizing domain. In some embodiments, ligands, DDs and SREs of the present invention, include without limitation, any of those taught in Tables 2-4 of copending commonly owned U.S. Provisional Patent Application No. 62/320,864 filed on Apr. 11, 2016, or in U.S. Provisional Application No. 62/466,596 filed Mar. 3, 2017 and the International Publication WO2017/180587, the contents of each of which are incorporated herein by reference in their entirety.

[0354] Some examples of the proteins that may be used to develop DDs and their ligands are listed in Table 1.

TABLE 1
Proteins and their binding ligands

| | | Protein | |
|---|---|---|---|
| | | SEQ ID | |
| Protein | Protein Sequence | NO.: | Ligands |
| E. coli | MISLIAALAVDRVIGMENAMPWNLPADL | 194 | Methotrexate |
| Dihydrofolate | AWFKRNTLNKPVIMGRHTWESIGRPLPGR | | (MTX) |
| reductase | KNIILSSQPGTDDRVTWVKSVDEAIAACG | | Trimethoprim |
| (ecDHFR) | DVPEIMVIGGGRVYEQFLPKAQKLYLTHI | | (TMP) |
| (Uniprot ID: | DAEVEGDTHFPDYEPDDWESVFSEFHDA | | |
| P0ABQ4) | DAQNSHSYCFEILERR | | |
| Human | MVGSLNCIVAVSQNMGIGKNGDLPWPPL | 193 | Methotrexate |
| Dihydrofolate | RNEFRYFQRMTTTSSVEGKQNLVIMGKK | | (MTX) |
| reductase | TWFSIPEKNRPLKGRINLVLSRELKEPPQG | | Trimethoprim |
| (hDHFR) | AHFLSRSLDDALKLTEQPELANKVDMVW | | (TMP) |
| (Uniprot ID: | IVGGSSVYKEAMNHPGHLKLFVTRIMQDF | | |
| P00374) | ESDTFFPEIDLEKYKLLPEYPGVLSDVQEE | | |
| | KGIKYKFEVYEKND | | |
| FK506 binding | GVQVETISPGDGRTFPKRGQTCVVHYTG | 192 | Shield-1 |
| protein (FKBP) | MLEDGKKFDSSRDRNKPFKFMLGKQEVI | | |
| (Uniprot ID: | RGWEEGVAQMSVGQRAKLTISPDYAYGA | | |
| P62942) | TGHPGIIPPHATLVFDVELLKLE | | |
| Phosphodiesterase | MEETRELQSLAAAVVPSAQTLKITDFSFS | 195 | Sildenafil; |
| 5 (PDE5), | DFELSDLETALCTIRMFTDLNLVQNFQMK | | Vardenafil; |
| ligand binding | HEVLCRWILSVKKNYRKNVAYHNWRHA | | Tadalafil |
| domain (Uniprot | FNTAQCMFAALKAGKIQNKLTDLEILALL | | |
| ID: Uniprot ID | IAALSHDLDHRGVNNSYIQRSEHPLAQLY | | |
| O76074) | CHSIMEHHHFDQCLMILNSPGNQILSGLSI | | |
| | EEYKTTLKIIKQAILATDLALYIKRRGEFFE | | |
| | LIRKNQFNLEDPHQKELFLAMLMTACDLS | | |
| | AITKPWPIQQRIAELVATEFFDQGDRERKE | | |
| | LNIEPTDLMNREKKNKIPSMQVGFIDAICL | | |
| | QLYEALTHVSEDCFPLLDGCRKNRQKWQ | | |
| | ALAEQQ | | |
| PPAR gamma, | SVEAVQEITEYAKSIPGFVNLDLNDQVTL | 196 | Posiglitazone |
| ligand binding | LKYGVHEIIYTMLASLMNKDGVLISEGQG | | Pioglitazone |
| domain (Uniprot | FMTREFLKSLRKPFGDFMEPKFEFAVKFN | | |
| ID: P37231; | ALELDDSDLAIFIAVIILSGDRPGLLNVKPI | | |
| amino acids 317- | EDIQDNLLQALELQLKLNHPESSQLFAKL | | |
| 505) | LQKMTDLRQIVTEHVQLLQVIKKTETDMS | | |
| | LHPLLQEIYKDLY | | |
| Carbonic | MSHHWGYGKHNGPEHWHKDFPIAKGER | 197 | Celecoxib |
| anhydrase II | QSPVDIDTHTAKYDPSLKPLSVSYDQATS | | Acetazolamide |
| (CA2)(Uniprot | LRILNNGHAFNVEFDDSQDKAVLKGGPL | | |
| ID: P00918) | DGTYRLIQFHFHWGSLDGQGSEHTVDKK | | |
| | KYAAELHLVHWNTKYGDFGKAVQQPDG | | |
| | LAVLGIFLKVGSAKPGLQKVVDVLDSIKT | | |
| | KGKSADFTNFDPRGLLPESLDYWTYPGSL | | |
| | TTPPLLECVTWIVLKEPISVSSEQVLKFRK | | |
| | LNFNGEGEPEELMVDNWRPAQPLKNRQI | | |
| | KASFK | | |
| NRH: Quinone | MAGKKVLIVYAHQEPKSFNGSLKNVAVD | 198 | Imatinib |
| oxidoreductase 2 | ELSRQGCTVTVSDLYAMNLEPRATDKDIT | | Melatonin |
| (NQO2)(Uniprot | GTLSNPEVFNYGVETHEAYKQRSLASDIT | | |
| ID: P16083) | DEQKKVREADLVIFQFPLYWFSVPAILKG | | |
| | WMDRVLCQGFAFDIPGFYDSGLLQGKLA | | |
| | LLSVTTGGTAEMYTKTGVNGDSRYFLWP | | |
| | LQHGTLHFCGFKVLAPQISFAPEIASEEER | | |
| | KGMVAAWSQRLQTIWKEEPIPCTAHWHF | | |
| | GQ | | |
| Dipeptidyl | MKTPWKVLLGLLGAAALVTIITVPVVLLN | 1172 | Sitagliptin, |
| peptidases | KGTDDATADSRKTYTLTDYLKNTYRLKL | | Saxagliptin, |
| (DPPIV)(Uniprot | YSLRWISDHEYLYKQENNILVFNAEYGNS | | Denagliptin |
| ID: P27487) | SVFLENSTFDEFGHSINDYSISPDGQFILLE | | |
| | YNYVKQWRHSYTASYDIYDLNKRQLITE | | |
| | ERIPNNTQWVTWSPVGHKLAYVWNNDIY | | |
| | VKIEPNLPSYRITWTGKEDIIYNGITDWVY | | |
| | EEEVFSAYSALWWSPNGTFLAYAQFNDT | | |
| | EVPLIEYSFYSDESLQYPKTVRVPYPKAG | | |
| | AVNPTVKFFVVNTDSLSSVTNATSIQITAP | | |
| | ASMLIGDHYLCDVTWATQERISLQWLRRI | | |
| | QNYSVMDICDYDESSGRWNCLVARQHIE | | |
| | MSTTGWVGRFRPSEPHFTLDGNSFYKIISN | | |
| | EEGYRHICYFQIDKKDCTFITKGTWEVIGI | | |
| | EALTSDYLYYISNEYKGMPGGRNLYKIQL | | |
| | SDYTKVTCLSCELNPERCQYYSVSFSKEA | | |
| | KYYQLRCSGPGLPLYTLHSSVNDKGLRVL | | |
| | EDNSALDKMLQNVQMPSKKLDFIILNETK | | |
| | FWYQMILPPHFDKSKKYPLLLDVYAGPCS | | |
| | QKADTVFRLNWATYLASTENIIVASFDGR | | |
| | GSGYQGDKIMHAINRRLGTFEVEDQIEAA | | |
| | RQFSKMGFVDNKRIAIWGWSYGGYVTSM | | |
| | VLGSGSGVFKCGIAVAPVSRWEYYDSVY | | |
| | TERYMGLPTPEDNLDHYRNSTVMSRAEN | | |
| | FKQVEYLLIHGTADDNVHFQQSAQISKAL | | |
| | VDVGVDFQAMWYTDEDHGIASSTAHQHI | | |
| | YTHMSHFIKQCFSLP | | |

[0355] In some embodiments, DDs of the invention may be FKBP DD or ecDHIFR DDs such as those listed in Table 2. The position of the mutated amino acid listed in Table 2 is relative to the ecDHIFR (Uniprot TD: POABQ4) of SEQ ID NO. 4219 for ecDHIFR DDs and relative to FKBP (Uniprot ID: P62942) of SEQ TD NO. 4220 for FKBP DDs.

[0356] In some embodiments, DDs of the invention may be FKBP DD or ecDHIFR DDs such as those listed in Table 2. In some embodiments, binding ligand of FKBP DD may be Aquashield, which has considerably improved solubility in aqueous medium compared to Shield-1, but retains all the binding properties of Shield-1. The position of the mutated amino acid listed in Table 2 is relative to the ecDHIFR (Uniprot ID: POABQ4) of SEQ TD NO. 4221 for ecDHIFR DDs and relative to FKBP (Uniprot TD: P62942) of SEQ ID NO. 4222 for FKBP DDs.

TABLE 2
ecDHFR DDs and FKBP DDs

| | | SEQ ID |
|---|---|---|
| DD | Sequence | NO: |
| ecDHFR | MISLIAALAVDYVIGMENAMPWNLPADLAWFKRNTL | 1173 |
| (R12Y, | NKPVIMGRHTWESIGRPLPGRKNIILSSQPGTDDRVTW | |
| Y100I) | VKSVDEAIAACGDVPEIMVIGGGRVIEQFLPKAQKLY | |
| | LTHIDAEVEGDTHFPDYEPDDWESVFSEFHDADAQNS | |
| | HSYCFEILERR | |
| ecDHFR | ISLIAALAVDYVIGMENAMPWNLPADLAWFKRNTLN | 1174 |
| (Amino acid | KPVIMGRHTWESIGRPLPGRKNIILSSQPGTDDRVTWV | |
| 2-159 of WT) | KSVDEAIAACGDVPEIMVIGGGRVIEQFLPKAQKLYLT | |
| (R12Y, | HIDAEVEGDTHFPDYEPDDWESVFSEFHDADAQNSHS | |
| Y100I) | YCFEILERR | |
| ecDHFR | ISLIAALAVDHVIGMENAMPWNLPADLAWFKRNTLN | 1175 |
| (Amino acid | KPVIMGRHTWESIGRPLPGRKNIILSSQPGTDDRVTWV | |
| 2-159 of WT) | KSVDEAIAACGDVPEIMVIGGGRVYEQFLPKAQKLYL | |
| (R12H, | THIDAEVEGDTHFPDYKPDDWESVFSEFHDADAQNSH | |
| E129K) | SYCFEILERR | |
| FKBP(F36V, | GVQVETISPGDGRTFPKRGQTCVVHYTGMLEDGKKV | 1176 |
| L106P) | DSSRDRNKPFKFMLGKQEVIRGWEEGVAQMSVGQRA | |
| | KLTISPDYAYGATGHPGIIPPHATLVFDVELLKPE | |
| FKBP(E31G, | GVQVETISPGDGRTFPKRGQTCVVHYTGMLGDGKKV | 1177 |
| F36V, R71G, | DSSRDRNKPFKFMLGKQEVIRGWEEGVAQMSVGQGA | |
| K105E) | KLTISPDYAYGATGHPGIIPPHATLVFDVELLELE | |

[0357] Inventors of the present invention have tested and identified several candidate human proteins that may be used to develop destabilizing domains. As show in Table 2, these candidates include human DHFR (hDHFR), PDE5 (phosphodiesterase 5), PPAR gamma (peroxisome proliferator-activated receptor gamma), CA2 (Carbonic anhydrase II) and NQO2 (NRH: Quinone oxidoreductase 2). Candidate destabilizing domain sequence identified from protein domains of these proteins (as a template) may be mutated to generate libraries of mutants based on the template candidate domain sequence. Mutagenesis strategies used to generate DD libraries may include site-directed mutagenesis e.g. by using structure guided information; or random mutagenesis e.g. using error-prone PCR, or a combination of both. In some embodiments, destabilizing domains identified using random mutagenesis may be used to identify structural properties of the candidate DDs that may be required for destabilization, which may then be used to further generate libraries of mutations using site directed mutagenesis.

### Human DHFR Mutants

[0358] In some embodiments, DDs of the invention may be derived from human dihydrofolate reductase (DHFR). DHFR is a small (18 kDa) enzyme that catalyzes the reduction of dihydrofolate and plays a vital role in variety of anabolic pathway. Dihydrofolate reductase (DHFR) is an essential enzyme that converts 7,8-dihydrofolate (DHF) to 5,6,7,8, tetrahydrofolate (THF) in the presence of nicotinamide adenine dihydrogen phosphate (NADPH). Anti-folate drugs such as methotrexate (MTX), a structural analogue of folic acid, which bind to DHFR more strongly than the natural substrate DHF, interferes with folate metabolism, mainly by inhibition of dihydrofolate reductase, resulting in the suppression of purine and pyrimidine precursor synthesis. MTX is a common cancer therapy.

[0359] Dihydrofolate reductase (DHFR) from Escherichia coli and various E. coli DHFR (ecDHFR) mutants bind to known DHFR inhibitors: Methotrexate (MTX). Upon binding to MTX, DHFR shows conformational changes and changes in thermodynamic stability (Wallace et al., J. Mol. Biol., 2002, 315:193-211) and such structural changes affect protein stability. Other inhibitors of DHFR: folate, TQD, Trimethoprim (TMP), epigallocatechin gallate (EGCG) and ECG (epicatechin gallate) can also bind to ecDHFR mutants and regulates its stability. In some embodiments, DDs of the present invention may be identified by utilizing a cocktail of DHFR inhibitors. In other instances, the suitable DDs may be identified by screening first with one DHFR inhibitor and subsequently screening with a second DHFR inhibitor.

[0360] In some embodiments, the destabilizing domains of the invention may include wildtype nucleotide sequences which may be utilized to reduce the basal expression of the compositions of the invention. Previous studies have shown that dihydrofolate reductase protein molecules can bind to their cognate mRNA and effectively repressing its translation. Alternatively, the nucleic acid sequence of the codons may be selected to alter translation rates. In some embodiments, amino acids identified as critical regulators of DHFR translation repression may be mutated to enhance translation rates. Examples of such mutations include but are not limited to I7A, R28A and F34S residues of wildtype DHFR protein, described by Tai N et al. (2002), Nucleic Acids Res. 30(20): 4481-4488; the contents of which are incorporated by reference in their entirety.

[0361] In accordance with the present invention, the structural properties of human DHFR protein were compared to those of ecDHFR and amino acid residues corresponding to known ecDHFR mutations having destabilizing properties were identified. Site directed mutagenesis of hDHFR protein was then used to generate several hDHFR mutants and their destabilization in the absence of its binding ligand was tested. Binding to DHFR ligands, MTX and TMP to human DHFR was tested and ligand dependent stabilization was characterized. Several hDHFR destabilizing mutants were discovered. The ecDHIFR and hDHFR amino acid sequences and nucleotide sequences are provided in Table 3. In Table 3, the linkers are represented in bold and the restriction sites are underlined. The amino acid sequences in Table 3 may comprise a stop codon which is denoted in the table with a “*k” at the end of the amino acid sequence.

TABLE 3
Sequences of hDHFR and ecDHFR and construct components

| | | Amino | Nucleic |
|---|---|---|---|
| | | Acid | Acid |
| | | SEQ ID | SEQ ID |
| Description | Amino Acid Sequence | NO. | NO. |
| Human DHFR | MVGSLNCIVAVSQNMGIGKNGDLPWPPLRNEFRYFQRMTT | 1 | 4223 |
| (hDHFR)- | TSSVEGKQNLVIMGKKTWFSIPEKNRPLKGRINLVLSRELKE | | |
| wildtype (WT) | PPQGAHFLSRSLDDALKLTEQPELANKVDMVWIVGGSSVY | | |
| (Uniprot ID: | KEAMNHPGHLKLFVTRIMQDFESDTFFPEIDLEKYKLLPEY | | |
| P00374) | PGVLSDVQEEKGIKYKFEVYEKND | | |
| E coli DHFR | MISLIAALAVDRVIGMENAMPWNLPADLAWFKRNTLNKPV | 1179 | 4224 |
| (ecDHFR)- | IMGRHTWESIGRPLPGRKNIILSSQPGTDDRVTWVKSVDEAI | | |
| wildtype (WT) | AACGDVPEIMVIGGGRVYEQFLPKAQKLYLTHIDAEVEGDT | | |
| (Uniprot ID: | HFPDYEPDDWESVFSEFHDADAQNSHSYCFEILERR | | |
| P0ABQ4) | | | |
| AcGFP1, sub | MVSKGAELFTGIVPILIELNGDVNGHKFSVSGEGEGDATYG | 1181 | 4225 |
| cloned from | KLTLKFICTTGKLPVPWPTLVTTLSYGVQCFSRYPDHMKQH | | |
| pIRES2-AcGFP | DFFKSAMPEGYIQERTIFFEDDGNYKSRAEVKFEGDTLVNRI | | |
| (Uniprot ID: | ELTGTDFKEDGNILGNKMEYNYNAHNVYIMTDKAKNGIKV | | |
| BAE93141) | NFKIRHNIEDGSVQLADHYQQNTPIGDGPVLLPDNHYLSTQ | | |
| | SALSKDPNEKRDHMIYFGFVTAAAITHGMDELYK | | |
| linker | GGSGGG | 1183 | 4226-4227 |
| hDHFR(wt)- | MVGSLNCIVAVSQNMGIGKNGDLPWPPLRNEFRYFQRMTT | 1186 | 4228 |
| Restriction Site | TSSVEGKQNLVIMGKKTWFSIPEKNRPLKGRINLVLSRELKE | | |
| (TS)-Linker | PPQGAHFLSRSLDDALKLTEQPELANKVDMVWIVGGSSVY | | |
| (GGSGGG (SEQ | KEAMNHPGHLKLFVTRIMQDFESDTFFPEIDLEKYKLLPEY | | |
| ID NO: 2728))- | PGVLSDVQEEKGIKYKFEVYEKNDTSGGSGGGMVSKGAEL | | |
| AcGFP(N- | FTGIVPILIELNGDVNGHKFSVSGEGEGDATYGKLTLKFICT | | |
| terminal fusion | TGKLPVPWPTLVTTLSYGVQCFSRYPDHMKQHDFFKSAMP | | |
| polypeptide) | EGYIQERTIFFEDDGNYKSRAEVKFEGDTLVNRIELTGTDFK | | |
| | EDGNILGNKMEYNYNAHNVYIMTDKAKNGIKVNFKIRHNI | | |
| | EDGSVQLADHYQQNTPIGDGPVLLPDNHYLSTQSALSKDP | | |
| | NEKRDHMIYFGFVTAAAITHGMDELYK* | | |
| AcGFP-Linker | MVSKGAELFTGIVPILIELNGDVNGHKFSVSGEGEGDATYG | 1187 | 4229 |
| (GGSGGG (SEQ | KLTLKFICTTGKLPVPWPTLVTTLSYGVQCFSRYPDHMKQH | | |
| ID NO: 2728))- | DFFKSAMPEGYIQERTIFFEDDGNYKSRAEVKFEGDTLVNRI | | |
| Restriction Site | ELTGTDFKEDGNILGNKMEYNYNAHNVYIMTDKAKNGIKV | | |
| (TS)- | NFKIRHNIEDGSVQLADHYQQNTPIGDGPVLLPDNHYLSTQ | | |
| hDHFR(Amino | SALSKDPNEKRDHMIYFGFVTAAAITHGMDELYKGGSGGG | | |
| acid 2-187 of WT) | TSVGSLNCIVAVSQNMGIGKNGDLPWPPLRNEFRYFQRMT | | |
| (C-terminal fusion | TTSSVEGKQNLVIMGKKTWFSIPEKNRPLKGRINLVLSRELK | | |
| polypeptide) | EPPQGAHFLSRSLDDALKLTEQPELANKVDMVWIVGGSSV | | |
| | YKEAMNHPGHLKLFVTRIMQDFESDTFFPEIDLEKYKLLPE | | |
| | YPGVLSDVQEEKGIKYKFEVYEKND* | | |
| ecDHFR(wt)- | MISLIAALAVDRVIGMENAMPWNLPADLAWFKRNTLNKPV | 1188 | 4230 |
| AcGFP(N- | IMGRHTWESIGRPLPGRKNIILSSQPGTDDRVTWVKSVDEAI | | |
| terminal fusion | AACGDVPEIMVIGGGRVYEQFLPKAQKLYLTHIDAEVEGDT | | |
| polypeptide) | HFPDYEPDDWESVFSEFHDADAQNSHSYCFEILERRGGSGG | | |
| | GMVSKGAELFTGIVPILIELNGDVNGHKFSVSGEGEGDATY | | |
| | GKLTLKFICTTGKLPVPWPTLVTTLSYGVQCFSRYPDHMKQ | | |
| | HDFFKSAMPEGYIQERTIFFEDDGNYKSRAEVKFEGDTLVN | | |
| | RIELTGTDFKEDGNILGNKMEYNYNAHNVYIMTDKAKNGI | | |
| | KVNFKIRHNIEDGSVQLADHYQQNTPIGDGPVLLPDNHYLS | | |
| | TQSALSKDPNEKRDHMIYFGFVTAAAITHGMDELYK* | | |

[0362] In some embodiments, the DHFR derived destabilizing domains may be derived from variants, and or isoforms of DHFR. The three isoforms of DHFR differ in their C and N terminal regions. Isoform 1 is the longest transcript and encodes the longest isoform and is represented by SEQ ID NO. 4231, encoded by SEQ ID NO. 4232. Isoform 2 lacks an alternate exon in the 5′ end compared to isoform 1. This difference causes translation initiation at a downstream AUG and results in an isoform with a shorter N terminus compared to isoform 1. Isoform 2 is represented by SEQ ID NO. 4233, encoded by SEQ ID NO. 4234. Isoform 3 lacks an alternate exon in the 3′ end compared to isoform 1, that causes frameshift. The resulting isoform has a shorter and distinct C terminus compared to isoform 1. Isoform 3 is represented by SEQ ID NO. 4235, encoded by SEQ ID NO. 4236.

[0363] In some embodiments, the first amino acid from the destabilizing domain may be removed or substituted when fused to the linker region or payload. As a non-limiting example, the first amino acid is methionine (M) and it is removed from the destabilizing domain.

[0364] DDs of the present invention may also be derived from DHFR variant. Masters I N et al. have described a DHFR variant (SEQ ID NO. 4237); which bears 80% identity and 48% query coverage to SEQ ID NO. 1 (Masters I N et al (1983). J Mol Biol.; 167(1):23-36; the contents of which are incorporated by reference in its entirety).

[0365] In some embodiments, the DDs of the present invention may be derived from Dihydrofolate reductase like 1 (DHFRL1) represented by SEQ ID NO. 4238, encoded by SEQ ID NO. 4239. DHFRL1 is a mitochondrial dihydrofolate reductase with similar enzymatic activity as DHFR. In some embodiments, the DDs of the invention may be derived from known variants of DHFR such as DHFRP1, DHFRP2, and DHFRP3. Such variants are described in Anagnou N P, et al. (1984) PNAS 81:5170-5174; Anagnou N P et al. (1988) Am J Hum Genet 42:345-352; Shimada T, (1984). Gene 31:1-8; Maurer B J et al. (1985) Somatic Cell Mol Genet 11:79-85; the contents of each of which are incorporated by reference in their entirety.

[0366] The amino acid sequences of the destabilizing domains encompassed in the invention have at least about 40%, 50% or 60%, 70% identity, preferably at least about 75% or 80% identity, more preferably at least about 85%, 86%, 87%, 88%, 89% or 90% identity, and further preferably at least about 91%, 92%, 93%, 94%, 95%, 96%, 97%, 98%, or 99% identity to the amino acid sequences described therein. Percent identity may be determined, for example, by comparing sequence information using the advanced BLAST computer program, including version Magic-BLAST 1.2.0, available from the National Institutes of Health. The BLAST program is based on the alignment method discussed in Karl and Altschul (1990) Proc. Natl. Acad. Sci USA, 87:2264-68 (the contents of which are incorporated by reference in their entirety).

[0367] In some embodiments, novel DDs of the present invention comprise mutants of human DHFR presented in Table 4. The position of the mutated amino acids listed in Table 4 is relative to the wildtype human DHFR (Uniprot ID: P00374) of SEQ ID NO. 1. In Table 4, mutations are underlined and in bold. The amino acid sequences in Table 2 may comprise a stop codon which is denoted in the table with a “*” at the end of the amino acid sequence.

TABLE 4
Human DHFR mutants and novel destabilizing domains

| | | Amino | Nucleic |
|---|---|---|---|
| | | Acid SEQ | Acid SEQ |
| Mutants | Amino acid Sequence | ID NO | ID NO |
| hDHFR | MVGSLNCIVAVSQNMGIGKNGDLPWPPLRNEFRYFQRMTTTSS | 11 | 4240 |
| (Y122I) | VEGKQNLVIMGKKTWFSIPEKNRPLKGRINLVLSRELKEPPQGA | | |
| | HFLSRSLDDALKLTEQPELANKVDMVWIVGGSSVIKEAMNHP | | |
| | GHLKLFVTRIMQDFESDTFFPEIDLEKYKLLPEYPGVLSDVQEE | | |
| | KGIKYKFEVYEKND | | |
| hDHFR | VGSLNCIVAVSQNMGIGKNGDLPWPPLRNEFRYFQRMTTTSSV | 13 | 4241 |
| (Amino | EGKQNLVIMGKKTWFSIPEKNRPLKGRINLVLSRELKEPPQGAH | | |
| acid 2-187 | FLSRSLDDALKLTEQPELANKVDMVWIVGGSSVIKEAMNHPG | | |
| of WT) | HLKLFVTRIMQDFESDTFFPEIDLEKYKLLPEYPGVLSDVQEEK | | |
| (Y122I) | GIKYKFEVYEKND* | | |
| hDHFR | MVGSLNCIVAVSQNMGIGKNGDLPWPPLRNEFRYFQRMTTTSS | 21 | 4242 |
| (M53T, | VEGKQNLVITGKKTWFSIPEKNRPLKGRINLVLSRELKEPPQGA | | |
| R138I) | HFLSRSLDDALKLTEQPELANKVDMVWIVGGSSVYKEAMNHP | | |
| | GHLKLFVTIIMQDFESDTFFPEIDLEKYKLLPEYPGVLSDVQEEK | | |
| | GIKYKFEVYEKND | | |
| hDHFR | VGSLNCIVAVSQNMGIGKNGDLPWPPLRNEFRYFQRMTTTSSV | 36 | 4243 |
| (Amino | EGKQNLVITGKKTWFSIPEKNRPLKGRINLVLSRELKEPPQGAH | | |
| acid 2-187 | FLSRSLDDALKLTEQPELANKVDMVWIVGGSSVYKEAMNHPG | | |
| of WT) | HLKLFVTIIMQDFESDTFFPEIDLEKYKLLPEYPGVLSDVQEEKG | | |
| (M53T, | IKYKFEVYEKND | | |
| R138I) | | | |
| hDHFR | MVGSLNCIVAVSQNMGIGKNGDLPWPPLRNEFRYFQRMTTTSS | 27 | 4244 |
| (V75F, | VEGKQNLVIMGKKTWFSIPEKNRPLKGRINLFLSRELKEPPQGA | | |
| Y122I) | HFLSRSLDDALKLTEQPELANKVDMVWIVGGSSVIKEAMNHP | | |
| | GHLKLFVTRIMQDFESDTFFPEIDLEKYKLLPEYPGVLSDVQEE | | |
| | KGIKYKFEVYEKND | | |
| hDHFR | VGSLNCIVAVSQNMGIGKNGDLPWPPLRNEFRYFQRMTTTSSV | 40 | 4245 |
| (Amino | EGKQNLVIMGKKTWFSIPEKNRPLKGRINLFLSRELKEPPQGAH | | |
| acid 2-187 | FLSRSLDDALKLTEQPELANKVDMVWIVGGSSVIKEAMNHPG | | |
| of WT) | HLKLFVTRIMQDFESDTFFPEIDLEKYKLLPEYPGVLSDVQEEK | | |
| (V75F, | GIKYKFEVYEKND | | |
| Y122I) | | | |
| hDHFR | MVGSLNCIVAVSQNMGIGKNGDLPWPPLRNEFRYFQRMTTTSS | 28 | 4246 |
| (Y122I, | VEGKQNLVIMGKKTWFSIPEKNRPLKGRINLVLSRELKEPPQGA | | |
| A125F,) | HFLSRSLDDALKLTEQPELANKVDMVWIVGGSSVIKEFMNHPG | | |
| | HLKLFVTRIMQDFESDTFFPEIDLEKYKLLPEYPGVLSDVQEEK | | |
| | GIKYKFEVYEKND | | |
| hDHFR | VGSLNCIVAVSQNMGIGKNGDLPWPPLRNEFRYFQRMTTTSSV | 41 | 4247 |
| (Amino | EGKQNLVIMGKKTWFSIPEKNRPLKGRINLVLSRELKEPPQGAH | | |
| acid 2-187 | FLSRSLDDALKLTEQPELANKVDMVWIVGGSSVIKEFMNHPGH | | |
| of WT) | LKLFVTRIMQDFESDTFFPEIDLEKYKLLPEYPGVLSDVQEEKGI | | |
| (Y122I, | KYKFEVYEKND* | | |
| A125F) | | | |
| hDHFR | MVGSLNCIVAVSQNMGIGKNGDLPWPPLRNEFRYFQRMTTTSS | 19 | 4248 |
| (L74N, | VEGKQNLVIMGKKTWFSIPEKNRPLKGRINNVLSRELKEPPQG | | |
| Y122I) | AHFLSRSLDDALKLTEQPELANKVDMVWIVGGSSVIKEAMNH | | |
| | PGHLKLFVTRIMQDFESDTFFPEIDLEKYKLLPEYPGVLSDVQE | | |
| | EKGIKYKFEVYEKND | | |
| hDHFR | VGSLNCIVAVSQNMGIGKNGDLPWPPLRNEFRYFQRMTTTSSV | 34 | 4249 |
| (Amino | EGKQNLVIMGKKTWFSIPEKNRPLKGRINNVLSRELKEPPQGA | | |
| acid 2-187 | HFLSRSLDDALKLTEQPELANKVDMVWIVGGSSVIKEAMNHP | | |
| of WT) | GHLKLFVTRIMQDFESDTFFPEIDLEKYKLLPEYPGVLSDVQEE | | |
| (L74N, | KGIKYKFEVYEKND | | |
| Y122I) | | | |
| hDHFR | MVGSLNCIVAVSQNMGIGKNGDLPWPPLRNEFRYFQRMTTTSS | 20 | 4250 |
| (L94A, | VEGKQNLVIMGKKTWFSIPEKNRPLKGRINLVLSRELKEPPQGA | | |
| T147A) | HFLSRSADDALKLTEQPELANKVDMVWIVGGSSVYKEAMNHP | | |
| | GHLKLFVTRIMQDFESDAFFPEIDLEKYKLLPEYPGVLSDVQEE | | |
| | KGIKYKFEVYEKND | | |
| hDHFR | VGSLNCIVAVSQNMGIGKNGDLPWPPLRNEFRYFQRMTTTSSV | 35 | 4251 |
| (Amino | EGKQNLVIMGKKTWFSIPEKNRPLKGRINLVLSRELKEPPQGAH | | |
| acid 2-187 | FLSRSADDALKLTEQPELANKVDMVWIVGGSSVYKEAMNHPG | | |
| of WT) | HLKLFVTRIMQDFESDAFFPEIDLEKYKLLPEYPGVLSDVQEEK | | |
| (L94A, | GIKYKFEVYEKND | | |
| T147A) | | | |
| hDHFR | MVGSLNCIVAVSQNMGIGKNTDLPWPPLRNEFRYFQRMTTTSS | 16 | 4252 |
| (G21T, | VEGKQNLVIMGKKTWFSIPEKNRPLKGRINLVLSRELKEPPQGA | | |
| Y122I) | HFLSRSLDDALKLTEQPELANKVDMVWIVGGSSVIKEAMNHP | | |
| | GHLKLFVTRIMQDFESDTFFPEIDLEKYKLLPEYPGVLSDVQEE | | |
| | KGIKYKFEVYEKND | | |
| hDHFR | VGSLNCIVAVSQNMGIGKNTDLPWPPLRNEFRYFQRMTTTSSV | 32 | 4253 |
| (Amino | EGKQNLVIMGKKTWFSIPEKNRPLKGRINLVLSRELKEPPQGAH | | |
| acid 2-187 | FLSRSLDDALKLTEQPELANKVDMVWIVGGSSVIKEAMNHPG | | |
| of WT) | HLKLFVTRIMQDFESDTFFPEIDLEKYKLLPEYPGVLSDVQEEK | | |
| (G21T, | GIKYKFEVYEKND | | |
| Y122I) | | | |
| hDHFR | MVGSLNCIVAVSQNMGIGKNGDLPWPPLRNEFRYFQRMTTTSS | 26 | 4254 |
| (V121A, | VEGKQNLVIMGKKTWFSIPEKNRPLKGRINLVLSRELKEPPQGA | | |
| Y122I) | HFLSRSLDDALKLTEQPELANKVDMVWIVGGSSAIKEAMNHP | | |
| | GHLKLFVTRIMQDFESDTFFPEIDLEKYKLLPEYPGVLSDVQEE | | |
| | KGIKYKFEVYEKND | | |
| hDHFR | VGSLNCIVAVSQNMGIGKNGDLPWPPLRNEFRYFQRMTTTSSV | 39 | 4255 |
| (Amino | EGKQNLVIMGKKTWFSIPEKNRPLKGRINLVLSRELKEPPQGAH | | |
| acid 2-187 | FLSRSLDDALKLTEQPELANKVDMVWIVGGSSAIKEAMNHPG | | |
| of WT) | HLKLFVTRIMQDFESDTFFPEIDLEKYKLLPEYPGVLSDVQEEK | | |
| (V121A, | GIKYKFEVYEKND | | |
| Y122I) | | | |
| hDHFR | MVGSLNCIVAVSQNMGIGKNGDLPWPPLRNEFRYFKRMTTTSS | 23 | 4256 |
| (Q36K, | VEGKQNLVIMGKKTWFSIPEKNRPLKGRINLVLSRELKEPPQGA | | |
| Y122I) | HFLSRSLDDALKLTEQPELANKVDMVWIVGGSSVIKEAMNHP | | |
| | GHLKLFVTRIMQDFESDTFFPEIDLEKYKLLPEYPGVLSDVQEE | | |
| | KGIKYKFEVYEKND | | |
| hDHFR | VGSLNCIVAVSQNMGIGKNGDLPWPPLRNEFRYFKRMTTTSSV | 38 | 4257, |
| (Amino | EGKQNLVIMGKKTWFSIPEKNRPLKGRINLVLSRELKEPPQGAH | | 4258 |
| acid 2-187 | FLSRSLDDALKLTEQPELANKVDMVWIVGGSSVIKEAMNHPG | | |
| of WT) | HLKLFVTRIMQDFESDTFFPEIDLEKYKLLPEYPGVLSDVQEEK | | |
| (Q36K, | GIKYKFEVYEKND* | | |
| Y122I) | | | |
| hDHFR | MVGSLNCIVAVSQNMGIGKNGDLPWPPLRNEFRYFFRMTTTSS | 49 | 4259 |
| (Q36F, | VEGKQNLVIMGKKTWFSIPEKFRPLKGRINLVLSRELKEPPQGA | | |
| N65F, | HFLSRSLDDALKLTEQPELANKVDMVWIVGGSSVIKEAMNHP | | |
| Y122I) | GHLKLFVTRIMQDFESDTFFPEIDLEKYKLLPEYPGVLSDVQEE | | |
| | KGIKYKFEVYEKND | | |
| hDHFR | VGSLNCIVAVSQNMGIGKNGDLPWPPLRNEFRYFFRMTTTSSV | 56 | 4260 |
| (Amino | EGKQNLVIMGKKTWFSIPEKFRPLKGRINLVLSRELKEPPQGAH | | |
| acid 2-187 | FLSRSLDDALKLTEQPELANKVDMVWIVGGSSVIKEAMNHPG | | |
| of WT) | HLKLFVTRIMQDFESDTFFPEIDLEKYKLLPEYPGVLSDVQEEK | | |
| (Q36F, | GIKYKFEVYEKND* | | |
| N65F, | | | |
| Y122I) | | | |
| hDHFR | MVGSLNCIVAVSQNMGIGKNGDLPWPPLRNEFRYFFRMTTTSS | 50 | 4261 |
| (Q36F, | VEGKQNLVIMGKKTWFSIPEKNRPLKGRINLVLSRELKEPPQGA | | |
| Y122I, | HFLSRSLDDALKLTEQPELANKVDMVWIVGGSSVIKEFMNHPG | | |
| A125F) | HLKLFVTRIMQDFESDTFFPEIDLEKYKLLPEYPGVLSDVQEEK | | |
| | GIKYKFEVYEKND | | |
| hDHFR | VGSLNCIVAVSQNMGIGKNGDLPWPPLRNEFRYFFRMTTTSSV | 57 | 4262 |
| (Amino | EGKQNLVIMGKKTWFSIPEKNRPLKGRINLVLSRELKEPPQGAH | | |
| acid 2-187 | FLSRSLDDALKLTEQPELANKVDMVWIVGGSSVIKEFMNHPGH | | |
| of WT) | LKLFVTRIMQDFESDTFFPEIDLEKYKLLPEYPGVLSDVQEEKGI | | |
| (Q36F, | KYKFEVYEKND | | |
| Y122I, | | | |
| A125F) | | | |

[0368] According to the present invention, several hDHFR destabilizing mutants were discovered by random mutagenesis of the wildtype human DHFR using error prone polymerase chain reaction (PCR). The destabilization of the mutants in the absence of its binding ligand was tested. Binding to DHFR ligands, MTX and TMP to human DHFR was also tested and ligand dependent stabilization was characterized. Several hDHFR destabilizing mutants were discovered. The amino acid sequences of the DDs discovered by random mutagenesis are provided in Table 5. In Table 5, mutations are underlined and in bold. The position of the mutated amino acids listed in Table 5 is relative to the wildtype human DHFR (Uniprot ID: P00374) of SEQ TD NO. 1.

TABLE 5
Human DHFR mutants and new destabilizing domains

| | | | | Nucleic |
|---|---|---|---|---|
| | | | Amino | Acid |
| Clone | | | Acid SEQ | SEQ ID |
| number | hDHFR Mutants | Amino acid Sequence | ID NO | NO. |
| Clone | hDHFR (K81R) | MVGSLNCIVAVSQNMGIGKNGDLPWPPLRNE | 6 | 4263 |
| C1-12 | | FRYFQRMTTTSSVEGKQNLVIMGKKTWFSIPE | | |
| | | KNRPLKGRINLVLSRELREPPQGAHFLSRSLD | | |
| | | DALKLTEQPELANKVDMVWIVGGSSVYKEA | | |
| | | MNHPGHLKLFVTRIMQDFESDTFFPEIDLEKY | | |
| | | KLLPEYPGVLSDVQEEKGIKYKFEVYEKND | | |
| Clone | hDHFR (V9A, | MVGSLNCIAAVSQNMGIGKNGDLPWPPLRNE | 52 | 4264 |
| C1-18 | S93R, P150L) | FRYFQRMTTTSSVEGKQNLVIMGKKTWFSIPE | | |
| | | KNRPLKGRINLVLSRELKEPPQGAHFLSRRLD | | |
| | | DALKLTEQPELANKVDMVWIVGGSSVYKEA | | |
| | | MNHPGHLKLFVTRIMQDFESDTFFLEIDLEKY | | |
| | | KLLPEYPGVLSDVQEEKGIKYKFEVYEKND | | |
| Clone | hDHFR (F59S) | MVGSLNCIVAVSQNMGIGKNGDLPWPPLRNE | 3 | 4265 |
| C1-4 | | FRYFQRMTTTSSVEGKQNLVIMGKKTWSSIPE | | |
| | | KNRPLKGRINLVLSRELKEPPQGAHFLSRSLD | | |
| | | DALKLTEQPELANKVDMVWIVGGSSVYKEA | | |
| | | MNHPGHLKLFVTRIMQDFESDTFFPEIDLEKY | | |
| | | KLLPEYPGVLSDVQEEKGIKYKFEVYEKND | | |
| Clone | hDHFR (I17V) | MVGSLNCIVAVSQNMGVGKNGDLPWPPLRN | 4 | 4266 |
| C1-8 | | EFRYFQRMTTTSSVEGKQNLVIMGKKTWFSIP | | |
| | | EKNRPLKGRINLVLSRELKEPPQGAHFLSRSL | | |
| | | DDALKLTEQPELANKVDMVWIVGGSSVYKE | | |
| | | AMNHPGHLKLFVTRIMQDFESDTFFPEIDLEK | | |
| | | YKLLPEYPGVLSDVQEEKGIKYKFEVYEKND | | |
| Clone | hDHFR (N65D) | MVGSLNCIVAVSQNMGIGKNGDLPWPPLRNE | 10 | 4267 |
| C1-11 | | FRYFQRMTTTSSVEGKQNLVIMGKKTWFSIPE | | |
| | | KDRPLKGRINLVLSRELKEPPQGAHFLSRSLD | | |
| | | DALKLTEQPELANKVDMVWIVGGSSVYKEA | | |
| | | MNHPGHLKLFVTRIMQDFESDTFFPEIDLEKY | | |
| | | KLLPEYPGVLSDVQEEKGIKYKFEVYEKND | | |
| Clone | hDHFR (A10V, | MVGSLNCIVVVSQNMGIGKNGDLPWPPLRNE | 12 | 4268 |
| C2-21 | H88Y) | FRYFQRMTTTSSVEGKQNLVIMGKKTWFSIPE | | |
| | | KNRPLKGRINLVLSRELKEPPQGAYFLSRSLD | | |
| | | DALKLTEQPELANKVDMVWIVGGSSVYKEA | | |
| | | MNHPGHLKLFVTRIMQDFESDTFFPEIDLEKY | | |
| | | KLLPEYPGVLSDVQEEKGIKYKFEVYEKND | | |
| Clone | hDHFR (A107V) | MVGSLNCIVAVSQNMGIGKNGDLPWPPLRNE | 2 | 4269 |
| C1-3 | | FRYFQRMTTTSSVEGKQNLVIMGKKTWFSIPE | | |
| | | KNRPLKGRINLVLSRELKEPPQGAHFLSRSLD | | |
| | | DALKLTEQPELVNKVDMVWIVGGSSVYKEA | | |
| | | MNHPGHLKLFVTRIMQDFESDTFFPEIDLEKY | | |
| | | KLLPEYPGVLSDVQEEKGIKYKFEVYEKND | | |
| Clone | hDHFR (C7R, | MVGSLNRIVAVSQNMGIGKNGDLPWPPLRNE | 14 | 4270 |
| C1-10 | Y163C) | FRYFQRMTTTSSVEGKQNLVIMGKKTWFSIPE | | |
| | | KNRPLKGRINLVLSRELKEPPQGAHFLSRSLD | | |
| | | DALKLTEQPELANKVDMVWIVGGSSVYKEA | | |
| | | MNHPGHLKLFVTRIMQDFESDTFFPEIDLEKY | | |
| | | KLLPECPGVLSDVQEEKGIKYKFEVYEKND | | |
| Clone | hDHFR (N127Y) | MVGSLNCIVAVSQNMGIGKNGDLPWPPLRNE | 8 | 4271 |
| C1-14 | | FRYFQRMTTTSSVEGKQNLVIMGKKTWFSIPE | | |
| | | KNRPLKGRINLVLSRELKEPPQGAHFLSRSLD | | |
| | | DALKLTEQPELANKVDMVWIVGGSSVYKEA | | |
| | | MYHPGHLKLFVTRIMQDFESDTFFPEIDLEKY | | |
| | | KLLPEYPGVLSDVQEEKGIKYKFEVYEKND | | |
| Clone | hDHFR (K185E) | MVGSLNCIVAVSQNMGIGKNGDLPWPPLRNE | 5 | 4272 |
| C1-21 | | FRYFQRMTTTSSVEGKQNLVIMGKKTWFSIPE | | |
| | | KNRPLKGRINLVLSRELKEPPQGAHFLSRSLD | | |
| | | DALKLTEQPELANKVDMVWIVGGSSVYKEA | | |
| | | MNHPGHLKLFVTRIMQDFESDTFFPEIDLEKY | | |
| | | KLLPEYPGVLSDVQEEKGIKYKFEVYEEND | | |
| Clone | hDHFR (T137R, | MVGSLNCIVAVSQNMGIGKNGDLPWPPLRNE | 24 | 4273 |
| C1-25 | F143L) | FRYFQRMTTTSSVEGKQNLVIMGKKTWFSIPE | | |
| | | KNRPLKGRINLVLSRELKEPPQGAHFLSRSLD | | |
| | | DALKLTEQPELANKVDMVWIVGGSSVYKEA | | |
| | | MNHPGHLKLFVRRIMQDLESDTFFPEIDLEKY | | |
| | | KLLPEYPGVLSDVQEEKGIKYKFEVYEKND | | |
| Clone | hDHFR (I8V, | MVGSLNCVVAVSQNMGIGKNGDLPWPPLRN | 45 | 4274 |
| C2-8 | K133E, Y163C) | EFRYFQRMTTTSSVEGKQNLVIMGKKTWFSIP | | |
| | | EKNRPLKGRINLVLSRELKEPPQGAHFLSRSL | | |
| | | DDALKLTEQPELANKVDMVWIVGGSSVYKE | | |
| | | AMNHPGHLELFVTRIMQDFESDTFFPEIDLEK | | |
| | | YKLLPECPGVLSDVQEEKGIKYKFEVYEKND | | |
| Clone | hDHFR (K19E, | MVGSLNCIVAVSQNMGIGENGDLPWPPLRNE | 46 | 4275 |
| C2-15 | F89L, E181G) | FRYFQRMTTTSSVEGKQNLVIMGKKTWFSIPE | | |
| | | KNRPLKGRINLVLSRELKEPPQGAHLLSRSLD | | |
| | | DALKLTEQPELANKVDMVWIVGGSSVYKEA | | |
| | | MNHPGHLKLFVTRIMQDFESDTFFPEIDLEKY | | |
| | | KLLPEYPGVLSDVQEEKGIKYKFGVYEKND | | |
| Clone | hDHFR (N186D) | MVGSLNCIVAVSQNMGIGKNGDLPWPPLRNE | 9 | 4276 |
| C2-20 | | FRYFQRMTTTSSVEGKQNLVIMGKKTWFSIPE | | |
| | | KNRPLKGRINLVLSRELKEPPQGAHFLSRSLD | | |
| | | DALKLTEQPELANKVDMVWIVGGSSVYKEA | | |
| | | MNHPGHLKLFVTRIMQDFESDTFFPEIDLEKY | | |
| | | KLLPEYPGVLSDVQEEKGIKYKFEVYEKDD | | |
| Clone | hDHFR (G54R, | MVGSLNCIVAVSQNMGIGKNGDLPWPPLRNE | 54 | 4277 |
| C2-22 | I115L, M140V, | FRYFQRMTTTSSVEGKQNLVIMRKKTWFSIPE | | |
| | S168C) | KNRPLKGRINLVLSRELKEPPQGAHFLSRSLD | | |
| | | DALKLTEQPELANKVDMVWLVGGSSVYKEA | | |
| | | MNHPGHLKLFVTRIVQDFESDTFFPEIDLEKY | | |
| | | KLLPEYPGVLCDVQEEKGIKYKFEVYEKND | | |
| Clone | hDHFR (L23S, | MVGSLNCIVAVSQNMGIGKNGDSPWPPLRNE | 47 | 4278 |
| C2-23 | V121A, Y157C) | FRYFQRMTTTSSVEGKQNLVIMGKKTWFSIPE | | |
| | | KNRPLKGRINLVLSRELKEPPQGAHFLSRSLD | | |
| | | DALKLTEQPELANKVDMVWIVGGSSAYKEA | | |
| | | MNHPGHLKLFVTRIMQDFESDTFFPEIDLEKC | | |
| | | KLLPEYPGVLSDVQEEKGIKYKFEVYEKND | | |
| Clone | hDHFR (V110A, | MVGSLNCIVAVSQNMGIGKNGDLPWPPLRNE | 51 | 4279 |
| C1-24 | V136M, K177R) | FRYFQRMTTTSSVEGKQNLVIMGKKTWFSIPE | | |
| | | KNRPLKGRINLVLSRELKEPPQGAHFLSRSLD | | |
| | | DALKLTEQPELANKADMVWIVGGSSVYKEA | | |
| | | MNHPGHLKLFMTRIMQDFESDTFFPEIDLEKY | | |
| | | KLLPEYPGVLSDVQEEKGIRYKFEVYEKND | | |
| Clone | hDHFR (E162G, | MVGSLNCIVAVSQNMGIGKNGDLPWPPLRNE | 15 | 4280 |
| C2-25 | I176F) | FRYFQRMTTTSSVEGKQNLVIMGKKTWFSIPE | | |
| | | KNRPLKGRINLVLSRELKEPPQGAHFLSRSLD | | |
| | | DALKLTEQPELANKVDMVWIVGGSSVYKEA | | |
| | | MNHPGHLKLFVTRIMQDFESDTFFPEIDLEKY | | |
| | | KLLPGYPGVLSDVQEEKGFKYKFEVYEKND | | |
| Clone | hDHFR (Y178H, | MVGSLNCIVAVSQNMGIGKNGDLPWPPLRNE | 30 | 4281 |
| C3-1 | E181G) | FRYFQRMTTTSSVEGKQNLVIMGKKTWFSIPE | | |
| | | KNRPLKGRINLVLSRELKEPPQGAHFLSRSLD | | |
| | | DALKLTEQPELANKVDMVWIVGGSSVYKEA | | |
| | | MNHPGHLKLFVTRIMQDFESDTFFPEIDLEKY | | |
| | | KLLPEYPGVLSDVQEEKGIKHKFGVYEKND | | |
| Clone | hDHFR (N49D, | MVGSLNCIVAVSQNMGIGKNGDLPWPPLRNE | 48 | 4282 |
| C3-2 | F59S, D153G) | FRYFQRMTTTSSVEGKQDLVIMGKKTWSSIPE | | |
| | | KNRPLKGRINLVLSRELKEPPQGAHFLSRSLD | | |
| | | DALKLTEQPELANKVDMVWIVGGSSVYKEA | | |
| | | MNHPGHLKLFVTRIMQDFESDTFFPEIGLEKY | | |
| | | KLLPEYPGVLSDVQEEKGIKYKFEVYEKND | | |
| Clone | hDHFR (M140I) | MVGSLNCIVAVSQNMGIGKNGDLPWPPLRNE | 7 | 4283 |
| C3-3 | | FRYFQRMTTTSSVEGKQNLVIMGKKTWFSIPE | | |
| | | KNRPLKGRINLVLSRELKEPPQGAHFLSRSLD | | |
| | | DALKLTEQPELANKVDMVWIVGGSSVYKEA | | |
| | | MNHPGHLKLFVTRIIQDFESDTFFPEIDLEKYK | | |
| | | LLPEYPGVLSDVQEEKGIKYKFEVYEKND | | |
| Clone | hDHFR (H131R, | MVGSLNCIVAVSQNMGIGKNGDLPWPPLRNE | 17 | 4284 |
| C3-9 | E144G) | FRYFQRMTTTSSVEGKQNLVIMGKKTWFSIPE | | |
| | | KNRPLKGRINLVLSRELKEPPQGAHFLSRSLD | | |
| | | DALKLTEQPELANKVDMVWIVGGSSVYKEA | | |
| | | MNHPGRLKLFVTRIMQDFGSDTFFPEIDLEKY | | |
| | | KLLPEYPGVLSDVQEEKGIKYKFEVYEKND | | |
| Clone | hDHFR (T57A, | MVGSLNCIVAVSQNMGIGKNGDLPWPPLRNE | 25 | 4285 |
| C3-22 | I72A) | FRYFQRMTTTSSVEGKQNLVIMGKKAWFSIPE | | |
| | | KNRPLKGRANLVLSRELKEPPQGAHFLSRSLD | | |
| | | DALKLTEQPELANKVDMVWIVGGSSVYKEA | | |
| | | MNHPGHLKLFVTRIMQDFESDTFFPEIDLEKY | | |
| | | KLLPEYPGVLSDVQEEKGIKYKFEVYEKND | | |
| Clone | hDHFR (Y183H, | MVGSLNCIVAVSQNMGIGKNGDLPWPPLRNE | 31 | 4286 |
| C3-10 | K185E) | FRYFQRMTTTSSVEGKQNLVIMGKKTWFSIPE | | |
| | | KNRPLKGRINLVLSRELKEPPQGAHFLSRSLD | | |
| | | DALKLTEQPELANKVDMVWIVGGSSVYKEA | | |
| | | MNHPGHLKLFVTRIMQDFESDTFFPEIDLEKY | | |
| | | KLLPEYPGVLSDVQEEKGIKYKFEVHEEND | | |
| Clone | hDHFR (G21E, | MVGSLNCIVAVSQNMGIGKNEDLPWPPLRNE | 44 | 4287 |
| C4-3 | I72V, I176T) | FRYFQRMTTTSSVEGKQNLVIMGKKTWFSIPE | | |
| | | KNRPLKGRVNLVLSRELKEPPQGAHFLSRSLD | | |
| | | DALKLTEQPELANKVDMVWIVGGSSVYKEA | | |
| | | MNHPGHLKLFVTRIMQDFESDTFFPEIDLEKY | | |
| | | KLLPEYPGVLSDVQEEKGTKYKFEVYEKND | | |
| Clone | hDHFR (L100P, | MVGSLNCIVAVSQNMGIGKNGDLPWPPLRNE | 70 | 4288 |
| C1-2 | E102G, Q103R, | FRYFQRMTTTSSVEGKQNLVIMGKKTWFSIPE | | |
| | P104S, E105G, | KNRPLKGRINLVLSRELKEPPQGAHFLSRSLD | | |
| | N108D, V113A, | DALKPTGRSGLADKVDMARIVGGSSVCKEAI | | |
| | W114R, Y122C, | RYPGHPKLPVTRTMQDFESDTSLPEVALEKY | | |
| | M1261, N127R, | KLLPEYPGVLSGAQEEKGARYKFEAYERSD | | |
| | H128Y, L132P, | | | |
| | F135P, I139T, | | | |
| | F148S, F149L, | | | |
| | I152V, D153A, | | | |
| | D169G, V170A, | | | |
| | I176A, K177R, | | | |
| | V182A, K185R, | | | |
| | N186S) | | | |
| Clone | hDHFR (V2A, | MAGSLNCIVAVSQNMGIGKNGDLPWPPLRNE | 59 | 4289 |
| C1-5 | R33G, Q36R, | FGYFRRMTTTSSVEGKQNLVIMGKKTWFSIPE | | |
| | L100P, K185R) | KNRPLKGRINLVLSRELKEPPQGAHFLSRSLD | | |
| | | DALKPTEQPELANKVDMVWIVGGSSVYKEA | | |
| | | MNHPGHLKLFVTRIMQDFESDTFFPEIDLEKY | | |
| | | KLLPEYPGVLSDVQEEKGIKYKFEVYERND | | |
| Clone | hDHFR (G16S, | MVGSLNCIVAVSQNMSVGKNGDLPWPPLRN | 63 | 4290 |
| C1-6 | I17V, F89L, D96G, | EFRYFQRMTTTSSVEGKQNLVIMGKKTWFSIP | | |
| | K123E, M140V, | EKNRPLKGRINLVLSRELKEPPQGAHLLSRSL | | |
| | D146G, K156R) | DGALKLTEQPELANKVDMVWIVGGSSVYEE | | |
| | | AMNHPGHLKLFVTRIVQDFESGTFFPEIDLER | | |
| | | YKLLPEYPGVLSDVQEEKGIKYKFEVYEKND | | |
| Clone | hDHFR (F35L, | MVGSLNCIVAVSQNMGIGKNGDLPWPPLRNE | 67 | 4291 |
| C1-13 | R37G, N65A, L68S, | FRYLQGMTTTSSVEGKQNLVIMGKKTWFSIPE | | |
| | K69E, R71G, L80P, | KARPSEGGINLVLSREPKEPPQGAHFLSRSLD | | |
| | K99G, G117D, | DALGLTEQPELANKVDMVWIVDGSSVYKEA | | |
| | L132P, I139V, | MNHPGHPKLFVTRVIQGFESGTFFPEIDLEKY | | |
| | M140I, D142G, | KLLPEYPGVLSDVQEGKGIKYKFEVYEKNG | | |
| | D146G, E173G, | | | |
| | D187G) | | | |
| Clone | hDHFR (I17N, | MVGSLNCIVAVSQNMGNGKNGDLPWPPLRN | 62 | 4292 |
| C1-23 | L98S, K99R, | EFRYFQRMTTTSSVEGKQNLVIMGKKTWFSIP | | |
| | M112T, E151G, | EKNRPLKGRINLVLSRELKEPPQGAHFLSRSL | | |
| | E162G, E172G) | DDASRLTEQPELANKVDTVWIVGGSSVYKEA | | |
| | | MNHPGHLKLFVTRIMQDFESDTFFPGIDLEKY | | |
| | | KLLPGYPGVLSDVQGEKGIKYKFEVYEKND | | |
| Clone | hDHFR (R138G, | MVGSLNCIVAVSQNMGIGKNGDLPWPPLRNE | 65 | 4293 |
| C4-2 | D142G, F143S, | FRYFQRMTTTSSVEGKQNLVIMGKKTWFSIPE | | |
| | K156R, K158E, | KNRPLKGRINLVLSRELKEPPQGAHFLSRSLD | | |
| | E162G, V166A, | DALKLTEQPELANKVDMVWIVGGSSVYKEA | | |
| | K177E, Y178C, | MNHPGHLKLFVTGIMQGSESDTFFPEIDLERY | | |
| | K185E, N186S) | ELLPGYPGALSDVQEEKGIECKFEVYEESD | | |
| Clone | hDHFR (K81R, | MVGSLNCIVAVSQNMGIGKNGDLPWPPLRNE | 64 | 4294 |
| C4-5 | K99R, L100P, | FRYFQRMTTTSSVEGKQNLVIMGKKTWFSIPE | | |
| | E102G, N108D, | KNRPLKGRINLVLSRELREPPQGAHFLSRSLD | | |
| | K123R, H128R, | DALRPTGQPELADKVDMVWIVGGSSVYREA | | |
| | D142G, F180L, | MNRPGHLKLFVTRIMQGFESDTFFPEIDLEKY | | |
| | K185E) | KLLPEYPGVLSDVQEEKGIKYKLEVYEEND | | |
| Clone | hDHFR (N14S, | MVGSLNCIVAVSQSMGIGKNGDLSWPPLRNE | 66 | 4295 |
| C2-2 | P24S, F35L, M53T, | FRYLQRMTTTSSVEGKQNLVITGKETWFSIPE | | |
| | K56E, R92G, S93G, | KNRPLKGRINLVLSRELKEPPQGAHFLSGGLD | | |
| | N127S, H128Y, | DALKLTEQPELANKVDMVWIVGGSSVYKEA | | |
| | F135L, F143S, | MSYPGHLKLLVTRIMQDSESDTFFPEIDLEKY | | |
| | L159P, L160P, | KPPPEYPGVLSDVQEAKGIKYKLEVYEKND | | |
| | E173A, F180L) | | | |
| Clone | hDHFR (V2A, | MAGSLNCIVAVSQNMGVGKNGDLPWPPLRD | 69 | 4296 |
| C3-6 | Il7V, N30D, E31G, | GFRYFRRMTTTSSVEGKQNLVIMGKKTWSSIP | | |
| | Q36R, F59S, K69E, | EKNRPLEGRTNLVLSRELKEPPQGAYLLSRSL | | |
| | I72T, H88Y, F89L, | DDALKLTEQPELADEAGMVWVVGGSSVDKE | | |
| | N108D, K109E, | AMNHPGHPKLSVTRIVQDFGSDAFFPEIDLEK | | |
| | V110A, I115V, | CKLLPEYPGVLSDAQEERGIKYKFEVYEKSD | | |
| | Y122D, L132P, | | | |
| | F135S, M140V, | | | |
| | E144G, T147A, | | | |
| | Y157C, V170A, | | | |
| | K174R, N186S) | | | |
| Clone | hDHFR (L28P, | MVGSLNCIVAVSQNMGIGKNGDLPWPPPRHE | 68 | 4297 |
| C3-8 | N30H, M38V, | FRYFQRVTTTSSAEGKQNLVIMGKKTWFSIPE | | |
| | V44A, L68S, N73G, | KNRPSKGRIGLVLSGELKEPPQGAHFLSRSLD | | |
| | R78G, A97T, K99R, | DTLRLTEQPELTNRVNMVWIVGGSSVYKEAM | | |
| | A107T, K109R, | NHPGHLRPVVTRIMQDFESDAFFPEVDLEKYR | | |
| | D111N, L134P, | LLPEYPGVLSDVQGEKGIKYKFEAYRKND | | |
| | F135V, T147A, | | | |
| | I152V, K158R, | | | |
| | E172G, V182A, | | | |
| | E184R) | | | |
| Clone | hDHFR (A10T, | MVGSLNCIVTVSRSMGIGKDGDLSWPPLRSEF | 2745 | 4298 |
| C3-11 | Q13R, N14S, N20D, | RYFQRTTATSSVEGRQSLVIMGKRTWFSTPER | | |
| | P24S, N30S, M38T, | NRPLRGRANLVLSGELKGPPQGAHLLSRSLD | | |
| | T40A, K47R, N49S, | GALKLTEQPELADKVDVVRIVGGSSVDEEAM | | |
| | K56R, I61T, K64R, | NHPGHLKLFVTRVMRGFESDTLFPGIDLGKRK | | |
| | K69R, I72A, R78G, | LLPEYPGVLSDVREEKGIKYKLEVCGNN | | |
| | E82G, F89L, D96G, | | | |
| | N108D, M112V, | | | |
| | W114R, Y122D, | | | |
| | K123E, I139V, | | | |
| | Q141R, D142G, | | | |
| | F148L, E151G, | | | |
| | E155G, Y157R, | | | |
| | Q171R, Y183C, | | | |
| | E184G, K185del, | | | |
| | D187N) | | | |

[0369] Any of the mutations described in Table 4 may be combined with any of the mutations described in Table 5 to generate destabilizing domains. Exemplary combinations of mutations include, but are not limited to, hDHFR (I17V, Y122I) (SEQ ID NO. 4299 (amino acid 2-187 of WT, I17V, Y122I) (encoded by SEQ ID NO. 4300) or SEQ ID NO. 18 (I17V, Y122I) (encoded by SEQ ID NO. 4302)), hDHFR (Y122I, M140I) (SEQ ID NO. 4303 (amino acid 2-187 of WT, Y122I, M140I) (encoded by SEQ ID NO. 4304) or SEQ ID NO. 4305 (Y122I, M140I) (encoded by SEQ ID NO. 4306)), hDHFR (N127Y, Y122I) (SEQ ID NO. 4307 (amino acid 2-187 of WT, N127Y, Y122I) (encoded by SEQ ID NO. 4308) or SEQ ID NO. 4309 (N127Y, Y122I) (encoded by SEQ ID NO. 4310)), and hDHFR (Y122I, H131R, E144G) (SEQ ID NO. 4311 (amino acid 2-187 of WT, Y122I, H131R, E144G) (encoded by SEQ ID NO. 4312) or SEQ ID NO. 4313 (Y122I, H131R, E144G) (encoded by SEQ ID NO. 4314). The position of the mutated amino acids is relative to the wildtype human DHFR (Uniprot ID: P00374) of SEQ ID NO. 1.

[0370] In some embodiments, the DDs may be derived from hDHFR by mutating one or more amino acids residues between positions 1-10, 10-20, 20-30, 30-40, 40-50, 50-60, 60-70, 70-80, 80-90, 90-100, 100-110, 110-120, 120-130, 130-140, 140-150, 150-160, 160-170, 170-180 or 180-187 of human DHFR wildtype protein (SEQ ID NO. 1). In some embodiments, the mutation may be a conserved (with similar physicochemical properties as the amino acid at the mutation site), a semi conserved (e.g. negatively to positively charge amino acid) or a non-conserved (amino acid with different physicochemical properties than the amino acid at the mutation site). Regions or portions or domains of wild type proteins may be utilized as SREs/DDs in whole or in part. They may be combined or rearranged to create new peptides, proteins, regions or domains of which any may be used as SREs/DDs or the starting point for the design of further SREs and/or DDs.

[0371] In some embodiments, novel DDs derived from E. coli DHFR (ecDHFR) may comprise amino acids 2-159 of the wild type ecDHFR sequence. This may be referred to as an M1del mutation.

[0372] In some embodiments, novel DDs derived from ecDHFR may comprise amino acids 2-159 of the wild type ecDHFR sequence (also referred to as an M1del mutation), and may include one, two, three, four, five or more mutations including, but not limited to, M1del, R12Y, R12H, Y100I, and E129K.

[0373] In some embodiments, novel DDs derived from FKBP may comprise amino acids 2-107 of the wild type FKBP sequence. This may be referred to as an M1del mutation. In some embodiments, novel DDs derived from FKBP may comprise amino acids 2-107 of the wild type FBKP sequence (also referred to as an M1del mutation), and may include one, two, three, four, five or more mutations including, but not limited to, M1del, E31G, F36V, R71G, K105E, and L106P.

[0374] In some embodiments, novel DDs derived from E. coli DHFR (ecDHFR) may comprise amino acids 2-159 of the wild type ecDHFR sequence (SEQ ID NO. 4315). This may be referred to as an M1del mutation.

[0375] In some embodiments, novel DDs derived from ecDHFR may comprise amino acids 2-159 of the wild type ecDHFR sequence (SEQ ID NO. 4315) (also referred to as an M1del mutation), and may include one, two, three, four, five or more mutations including, but not limited to, M1del, R12Y, R12H, Y100I, and E129K.

[0376] In some embodiments, novel DDs derived from FKBP may comprise amino acids 2-107 of the wild type FKBP sequence (SEQ ID NO. 4316). This may be referred to as an M1del mutation.

[0377] In some embodiments, novel DDs derived from FKBP may comprise amino acids 2-107 of the wild type FBKP sequence (SEQ ID NO. 4316) (also referred to as an M1del mutation), and may include one, two, three, four, five or more mutations including, but not limited to, M1del, E31G, F36V, R71G, K105E, and L106P.

[0378] In some embodiments, DD mutant libraries may be screened for mutations with altered, preferably higher binding affinity to the ligand, as compared to the wild type protein. DD libraries may also be screened using two or more ligands and DD mutations that are stabilized by some ligands but not others may be preferentially selected. DD mutations that bind preferentially to the ligand compared to a naturally occurring protein may also be selected. Such methods may be used to optimize ligand selection and ligand binding affinity of the DD. Additionally, such approaches can be used to minimize deleterious effects caused by off-target ligand binding.

[0379] In some embodiments, suitable DDs may be identified by screening mutant libraries using barcodes. Such methods may be used to detect, identify and quantify individual mutant clones within the heterogeneous mutant library. Each DD mutant within the library may have distinct barcode sequences (with respect to each other). In other instances, the polynucleotides can also have different barcode sequences with respect to 2, 3, 4, 5, 6, 7, 8, 9, 10 or more nucleic acid bases. Each DD mutant within the library may also comprise a plurality of barcode sequences. When used in plurality may be used such that each barcode is unique to any other barcode. Alternatively, each barcode used may not be unique, but the combination of barcodes used may create a unique sequence that can be individually tracked. The barcode sequence may be placed upstream of the SRE, downstream of the SRE, or in some instances may be placed within the SRE. DD mutants may be identified by barcodes using sequencing approaches such as Sanger sequencing, and next generation sequencing, but also by polymerase chain reaction and quantitative polymerase chain reaction. In some embodiments, polymerase chain reaction primers that amplify a different size product for each barcode may be used to identify each barcode on an agarose gel. In other instances, each barcode may have a unique quantitative polymerase chain reaction probe sequence that enables targeted amplification of each barcode.

[0380] In some embodiments, DDs of the invention may be derived from human dihydrofolate reductase (hDHFR). hDHFR is a small (18 kDa) enzyme that catalyzes the reduction of dihydrofolate and plays a vital role in variety of anabolic pathway. Dihydrofolate reductase (DHFR) is an essential enzyme that converts 7,8-dihydrofolate (DHF) to 5,6,7,8, tetrahydrofolate (THF) in the presence of nicotinamide adenine dihydrogen phosphate (NADPH). Anti-folate drugs such as methotrexate (MTX), a structural analogue of folic acid, which bind to DHFR more strongly than the natural substrate DHF, interferes with folate metabolism, mainly by inhibition of dihydrofolate reductase, resulting in the suppression of purine and pyrimidine precursor synthesis. Other inhibitors of hDHFR such as folate, TQD, Trimethoprim (TMP), epigallocatechin gallate (EGCG) and ECG (epicatechin gallate) can also bind to hDHFR mutants and regulates its stability. In one aspect of the invention, the DDs of the invention may be hDHFR mutants including the single mutation hDHFR (Y122I), hDHFR (K81R), hDHFR (F59S), hDHFR (I17V), hDHFR (N65D), hDHFR (A107V), hDHFR (N127Y), hDHFR (K185E), hDHFR (N186D), and hDHFR (M140I); double mutations: hDHFR (M53T, R138I), hDHFR (V75F, Y122I), hDHFR (A125F, Y122I), hDHFR (L74N, Y122I), hDHFR (L94A, T147A), hDHFR (G21T, Y122I), hDHFR (V121A, Y122I), hDHFR (Q36K, Y122I), hDHFR (C7R, Y163C), hDHFR (Y178H, E18IG), hDHFR (A10V, H88Y), hDHFR (T137R, F143L), hDHFR (E63G, I176F), hDHFR (T57A, I72A), hDHFR (H131R, E144G), and hDHFR (Y183H, K185E); and triple mutations: hDHFR (Q36F, N65F, Y122I), hDHFR (G21E, I72V, I176T), hDHFR (I8V, K133E, Y163C), hDHFR (V9A, S93R, P150L), hDHFR (K19E, F89L, E181G), hDHFR (G54R, M140V, S168C), hDHFR (L23S, V121A, Y157C), hDHFR (V110A, V136M, K177R), and hDHFR (N49D, F59S, D153G).

[0381] In some embodiments, DDs of the invention may be derived from human dihydrofolate reductase (hDHFR). hDHFR is a small (18 kDa) enzyme that catalyzes the reduction of dihydrofolate and plays a vital role in variety of anabolic pathway. Dihydrofolate reductase (DHFR) is an essential enzyme that converts 7,8-dihydrofolate (DHF) to 5,6,7,8, tetrahydrofolate (THF) in the presence of nicotinamide adenine dihydrogen phosphate (NADPH). Anti-folate drugs such as methotrexate (MTX), a structural analogue of folic acid, which bind to DHFR more strongly than the natural substrate DHF, interferes with folate metabolism, mainly by inhibition of dihydrofolate reductase, resulting in the suppression of purine and pyrimidine precursor synthesis. Other inhibitors of hDHFR such as folate, TQD, Trimethoprim (TMP), epigallocatechin gallate (EGCG) and ECG (epicatechin gallate) can also bind to hDHFR mutants and regulates its stability. In one aspect of the invention, the DDs of the invention may be hDHFR mutants including the single mutation hDHFR (Y122I), hDHFR (K81R), hDHFR (F59S), hDHFR (I17V), hDHFR (N65D), hDHFR (A107V), hDHFR (N127Y), hDHFR (K185E), hDHFR (N186D), and hDHFR (M140I); double mutations: hDHFR (M53T, R138I), hDHFR (V75F, Y122I), hDHFR (A125F, Y122I), hDHFR (L74N, Y122I), hDHFR (L94A, T147A), hDHFR (G21T, Y122I), hDHFR (V121A, Y122I), hDHFR (Q36K, Y122I), hDHFR (C7R, Y163C), hDHFR (Y178H, E18IG), hDHFR (A10V, H88Y), hDHFR (T137R, F143L), hDHFR (E63G, I176F), hDHFR (T57A, I72A), hDHFR (H131R, E144G), and hDHFR (Y183H, K185E); and triple mutations: hDHFR (Q36F, N65F, Y122I), hDHFR (G21E, I72V, I176T), hDHFR (I8V, K133E, Y163C), hDHFR (V9A, S93R, P150L), hDHFR (K19E, F89L, E181G), hDHFR (G54R, M140V, S168C), hDHFR (L23S, V121A, Y157C), hDHFR (V110A, V136M, K177R), hDHFR (N49D, F59S, D153G) and hDHFR (N49D, F59S, D153G).

[0382] In one aspect of the invention, the DHFR DDs of the invention may include mutations such as, but not limited to V2A, C7R, I8V, V9A, A10T, A10V, Q13R, N14S, G16S, I17N, I17V, K19E, N20D, G21T, G21E, D22S, L23S, P24S, L28P, N30D, N30H, N30S, E31G, E31D, F32M, R33G, R33S, F35L, Q36R, Q36S, Q36K, Q36F, R37G, M38V, M38T, T40A, V44A, K47R, N49S, N49D, M53T, G54R, K56E, K56R, T57A, F59S, I61T, K64R, N65A, N65S, N65D, N65F, L68S, K69E, K69R, R71G, I72T, I72A, I72V, N73G, L74N, V75F, R78G, L80P, K81R, E82G, H88Y, F89L, R92G, S93G, S93R, L94A, D96G, A97T, L98S, K99G, K99R, L100P, E102G, Q103R, P104S, E105G, A107T, A107V, N108D, K109E, K109R, V110A, D111N, M112T, M112V, V113A, W114R, I115V, V116I, G117D, V121A, Y122C, Y122D, Y122I, K123R, K123E, A125F, M126I, N127R, N127S, N127Y, H128R, H128Y, H131R, L132P, K133E, L134P, F135P, F135L, F135S, F135V, V136M, T137R, R138G, R138I, I139T, 1139V, M140I, M140V, Q141R, D142G, F143S, F143L, E144G, D146G, T147A, F148S, F148L, F149L, P150L, E151G, 1152V, D153A, D153G, E155G, K156R, Y157R, Y157C, K158E, K158R, L159P, L160P, E162G, Y163C, V166A, S168C, D169G, V170A, Q171R, E172G, E173G, E173A, K174R, I176A, I176F, I176T, K177E, K177R, Y178C, Y178H, F180L, E181G, V182A, Y183C, Y183H, E184R, E184G, K185R, K185del, K185E, N186S, N186D, D187G, and D187N.

[0383] In one embodiment, the stimulus is a small molecule that binds to a SRE to post-translationally regulate protein levels. In one aspect, DHFR ligands: trimethoprim (TMP) and methotrexate (MTX) are used to stabilize hDHFR mutants. The hDHFR based destabilizing domains are listed in Table 6. The position of the mutated amino acid listed in Table 6 is relative to the human DHFR (Uniprot ID: P00374) of SEQ ID NO. 4317 for human DHFR. In Table 6, “del” means that the mutation is the deletion of the amino acid at that position relative to the wild type sequence.

TABLE 6
Human DHFR mutants and novel destabilizing domains

| | | SEQ ID |
|---|---|---|
| Mutants | Amino acid Sequence | NO |
| hDHFR (I17V) | MVGSLNCIVAVSQNMGVGKNGDLPWPPLRNEFRYFQR | 1197 |
| | MTTTSSVEGKQNLVIMGKKTWFSIPEKNRPLKGRINLVL | |
| | SRELKEPPQGAHFLSRSLDDALKLTEQPELANKVDMVW | |
| | IVGGSSVYKEAMNHPGHLKLFVTRIMQDFESDTFFPEID | |
| | LEKYKLLPEYPGVLSDVQEEKGIKYKFENYEKND | |
| hDHFR (F59S) | MVGSLNCIVAVSQNMGIGKNGDLPWPPLRNEFRYFQR | 1198 |
| | MTTTSSVEGKQNLVIMGKKTWSSIPEKNRPLKGRINLVL | |
| | SRELKEPPQGAHFLSRSLDDALKLTEQPELANKVDMVW | |
| | IVGGSSVYKEAMNHPGHLKLFVTRIMQDFESDTFFPEID | |
| | LEKYKLLPEYPGVLSDVQEEKGIKYKFENYEKND | |
| hDHFR (N65D) | MVGSLNCIVAVSQNMGIGKNGDLPWPPLRNEFRYFQR | 1199 |
| | MTTTSSVEGKQNLVIMGKKTWFSIPEKDRPLKGRINLVL | |
| | SRELKEPPQGAHFLSRSLDDALKLTEQPELANKVDMVW | |
| | IVGGSSVYKEAMNHPGHLKLFVTRIMQDFESDTFFPEID | |
| | LEKYKLLPEYPGVLSDVQEEKGIKYKFENYEKND | |
| hDHFR (K81R) | MVGSLNCIVAVSQNMGIGKNGDLPWPPLRNEFRYFQR | 1200 |
| | MTTTSSVEGKQNLVIMGKKTWFSIPEKNRPLKGRINLVL | |
| | SRELREPPQGAHFLSRSLDDALKLTEQPELANKVDMVW | |
| | IVGGSSVYKEAMNHPGHLKLFVTRIMQDFESDTFFPEID | |
| | LEKYKLLPEYPGVLSDVQEEKGIKYKFENYEKND | |
| hDHFR (A107V) | MVGSLNCIVAVSQNMGIGKNGDLPWPPLRNEFRYFQR | 1201 |
| | MTTTSSVEGKQNLVIMGKKTWFSIPEKNRPLKGRINLVL | |
| | SRELKEPPQGAHFLSRSLDDALKLTEQPELVNKVDMVW | |
| | IVGGSSVYKEAMNHPGHLKLFVTRIMQDFESDTFFPEID | |
| | LEKYKLLPEYPGVLSDVQEEKGIKYKFENYEKND | |
| hDHFR (Y122I) | MVGSLNCIVAVSQNMGIGKNGDLPWPPLRNEFRYFQR | 1202 |
| | MTTTSSVEGKQNLVIMGKKTWFSIPEKNRPLKGRINLVL | |
| | SRELKEPPQGAHFLSRSLDDALKLTEQPELANKVDMVW | |
| | IVGGSSVIKEAMNHPGHLKLFVTRIMQDFESDTFFPEIDL | |
| | EKYKLLPEYPGVLSDVQEEKGIKYKFEVYEKND | |
| hDHFR (N127Y) | MVGSLNCIVAVSQNMGIGKNGDLPWPPLRNEFRYFQR | 1203 |
| | MTTTSSVEGKQNLVIMGKKTWFSIPEKNRPLKGRINLVL | |
| | SRELKEPPQGAHFLSRSLDDALKLTEQPELANKVDMVW | |
| | IVGGSSVYKEAMYHPGHLKLFVTRIMQDFESDTFFPEID | |
| | LEKYKLLPEYPGVLSDVQEEKGIKYKFENYEKND | |
| hDHFR (M140I) | MVGSLNCIVAVSQNMGIGKNGDLPWPPLRNEFRYFQR | 1204 |
| | MTTTSSVEGKQNLVIMGKKTWFSIPEKNRPLKGRINLVL | |
| | SRELKEPPQGAHFLSRSLDDALKLTEQPELANKVDMVW | |
| | IVGGSSVYKEAMNHPGHLKLFVTRIIQDFESDTFFPEIDL | |
| | EKYKLLPEYPGVLSDVQEEKGIKYKFEVYEKND | |
| hDHFR (K185E) | MVGSLNCIVAVSQNMGIGKNGDLPWPPLRNEFRYFQR | 1205 |
| | MTTTSSVEGKQNLVIMGKKTWFSIPEKNRPLKGRINLVL | |
| | SRELKEPPQGAHFLSRSLDDALKLTEQPELANKVDMVW | |
| | IVGGSSVYKEAMNHPGHLKLFVTRIMQDFESDTFFPEID | |
| | LEKYKLLPEYPGVLSDVQEEKGIKYKFENYEEND | |
| hDHFR (N186D) | MVGSLNCIVAVSQNMGIGKNGDLPWPPLRNEFRYFQR | 1206 |
| | MTTTSSVEGKQNLVIMGKKTWFSIPEKNRPLKGRINLVL | |
| | SRELKEPPQGAHFLSRSLDDALKLTEQPELANKVDMVW | |
| | IVGGSSVYKEAMNHPGHLKLFVTRIMQDFESDTFFPEID | |
| | LEKYKLLPEYPGVLSDVQEEKGIKYKFENYEKDD | |
| hDHFR (C7R, Y163C) | MVGSLNRIVAVSQNMGIGKNGDLPWPPLRNEFRYFQR | 1207 |
| | MTTTSSVEGKQNLVIMGKKTWFSIPEKNRPLKGRINLVL | |
| | SRELKEPPQGAHFLSRSLDDALKLTEQPELANKVDMVW | |
| | IVGGSSVYKEAMNHPGHLKLFVTRIMQDFESDTFFPEID | |
| | LEKYKLLPECPGVLSDVQEEKGIKYKFEVYEKND | |
| hDHFR (A10V, H88Y) | MVGSLNCIVVVSQNMGIGKNGDLPWPPLRNEFRYFQR | 1208 |
| | MTTTSSVEGKQNLVIMGKKTWFSIPEKNRPLKGRINLVL | |
| | SRELKEPPQGAYFLSRSLDDALKLTEQPELANKVDMVW | |
| | IVGGSSVYKEAMNHPGHLKLFVTRIMQDFESDTFFPEID | |
| | LEKYKLLPEYPGVLSDVQEEKGIKYKFENYEKND | |
| hDHFR (Q36K, Y122I) | MVGSLNCIVAVSQNMGIGKNGDLPWPPLRNEFRYFKR | 1209 |
| | MTTTSSVEGKQNLVIMGKKTWFSIPEKNRPLKGRINLVL | |
| | SRELKEPPQGAHFLSRSLDDALKLTEQPELANKVDMVW | |
| | IVGGSSVIKEAMNHPGHLKLFVTRIMQDFESDTFFPEIDL | |
| | EKYKLLPEYPGVLSDVQEEKGIKYKFEVYEKND | |
| hDHFR (M53T, R138I) | MVGSLNCIVAVSQNMGIGKNGDLPWPPLRNEFRYFQR | 1210 |
| | MTTTSSVEGKQNLVITGKKTWFSIPEKNRPLKGRINLVL | |
| | SRELKEPPQGAHFLSRSLDDALKLTEQPELANKVDMVW | |
| | IVGGSSVYKEAMNHPGHLKLFVTIIMQDFESDTFFPEIDL | |
| | EKYKLLPEYPGVLSDVQEEKGIKYKFEVYEKND | |
| hDHFR (T57A, I72A) | MVGSLNCIVAVSQNMGIGKNGDLPWPPLRNEFRYFQR | 1211 |
| | MTTTSSVEGKQNLVIMGKKAWFSIPEKNRPLKGRANLV | |
| | LSRELKEPPQGAHFLSRSLDDALKLTEQPELANKVDMV | |
| | WIVGGSSVYKEAMNHPGHLKLFVTRIMQDFESDTFFPEI | |
| | DLEKYKLLPEYPGVLSDVQEEKGIKYKFEVYEKND | |
| hDHFR (E63G, I176F) | MVGSLNCIVAVSQNMGIGKNGDLPWPPLRNEFRYFQR | 1212 |
| | MTTTSSVEGKQNLVIMGKKTWFSIPGKNRPLKGRINLVL | |
| | SRELKEPPQGAHFLSRSLDDALKLTEQPELANKVDMVW | |
| | IVGGSSVYKEAMNHPGHLKLFVTRIMQDFESDTFFPEID | |
| | LEKYKLLPEYPGVLSDVQEEKGFKYKFEVYEKND | |
| hDHFR (G21T, Y122I) | MVGSLNCIVAVSQNMGIGKNTDLPWPPLRNEFRYFQRM | 1213 |
| | TTTSSVEGKQNLVIMGKKTWFSIPEKNRPLKGRINLVLS | |
| | RELKEPPQGAHFLSRSLDDALKLTEQPELANKVDMVWI | |
| | VGGSSVIKEAMNHPGHLKLFVTRIMQDFESDTFFPEIDL | |
| | EKYKLLPEYPGVLSDVQEEKGIKYKFEVYEKND | |
| hDHFR (L74N, Y122I) | MVGSLNCIVAVSQNMGIGKNGDLPWPPLRNEFRYFQR | 1214 |
| | MTTTSSVEGKQNLVIMGKKTWFSIPEKNRPLKGRINNVL | |
| | SRELKEPPQGAHFLSRSLDDALKLTEQPELANKVDMVW | |
| | IVGGSSVIKEAMNHPGHLKLFVTRIMQDFESDTFFPEIDL | |
| | EKYKLLPEYPGVLSDVQEEKGIKYKFEVYEKND | |
| hDHFR (V75F, Y122I) | MVGSLNCIVAVSQNMGIGKNGDLPWPPLRNEFRYFQR | 1215 |
| | MTTTSSVEGKQNLVIMGKKTWFSIPEKNRPLKGRINLFL | |
| | SRELKEPPQGAHFLSRSLDDALKLTEQPELANKVDMVW | |
| | IVGGSSVIKEAMNHPGHLKLFVTRIMQDFESDTFFPEIDL | |
| | EKYKLLPEYPGVLSDVQEEKGIKYKFEVYEKND | |
| hDHFR (L94A, T147A) | MVGSLNCIVAVSQNMGIGKNGDLPWPPLRNEFRYFQR | 1216 |
| | MTTTSSVEGKQNLVIMGKKTWFSIPEKNRPLKGRINLVL | |
| | SRELKEPPQGAHFLSRSADDALKLTEQPELANKVDMVW | |
| | IVGGSSVYKEAMNHPGHLKLFVTRIMQDFESDAFFPEID | |
| | LEKYKLLPEYPGVLSDVQEEKGIKYKFENYEKND | |
| DHFR (V121A, Y22I) | MVGSLNCIVAVSQNMGIGKNGDLPWPPLRNEFRYFQR | 1217 |
| | MTTTSSVEGKQNLVIMGKKTWFSIPEKNRPLKGRINLVL | |
| | SRELKEPPQGAHFLSRSLDDALKLTEQPELANKVDMVW | |
| | IVGGSSAIKEAMNHPGHLKLFVTRIMQDFESDTFFPEIDL | |
| | EKYKLLPEYPGVLSDVQEEKGIKYKFEVYEKND | |
| hDHFR (Y122I, A125F) | MVGSLNCIVAVSQNMGIGKNGDLPWPPLRNEFRYFQR | 1218 |
| | MTTTSSVEGKQNLVIMGKKTWFSIPEKNRPLKGRINLVL | |
| | SRELKEPPQGAHFLSRSLDDALKLTEQPELANKVDMVW | |
| | IVGGSSVIKEFMNHPGHLKLFVTRIMQDFESDTFFPEIDL | |
| | EKYKLLPEYPGVLSDVQEEKGIKYKFEVYEKND | |
| hDHFR (H131R, E144G) | MVGSLNCIVAVSQNMGIGKNGDLPWPPLRNEFRYFQR | 1219 |
| | MTTTSSVEGKQNLVIMGKKTWFSIPEKNRPLKGRINLVL | |
| | SRELKEPPQGAHFLSRSLDDALKLTEQPELANKVDMVW | |
| | IVGGSSVYKEAMNHPGRLKLFVTRIMQDFGSDTFFPEID | |
| | LEKYKLLPEYPGVLSDVQEEKGIKYKFENYEKND | |
| hDHFR (T137R, F143L) | MVGSLNCIVAVSQNMGIGKNGDLPWPPLRNEFRYFQR | 1220 |
| | MTTTSSVEGKQNLVIMGKKTWFSIPEKNRPLKGRINLVL | |
| | SRELKEPPQGAHFLSRSLDDALKLTEQPELANKVDMVW | |
| | IVGGSSVYKEAMNHPGHLKLFVRRIMQDLESDTFFPEID | |
| | LEKYKLLPEYPGVLSDVQEEKGIKYKFENYEKND | |
| hDHFR (Y178H, E18IG) | MVGSLNCIVAVSQNMGIGKNGDLPWPPLRNEFRYFQR | 1221 |
| | MTTTSSVEGKQNLVIMGKKTWFSIPEKNRPLKGRINLVL | |
| | SRELKEPPQGAHFLSRSLDDALKLTEQPELANKVDMVW | |
| | IVGGSSVYKEAMNHPGHLKLFVTRIMQDFESDTFFPEID | |
| | LEKYKLLPEYPGVLSDVQEEKGIKHKFGVYEKND | |
| hDHFR (Y183H, K185E) | MVGSLNCIVAVSQNMGIGKNGDLPWPPLRNEFRYFQR | 1222 |
| | MTTTSSVEGKQNLVIMGKKTWFSIPEKNRPLKGRINLVL | |
| | SRELKEPPQGAHFLSRSLDDALKLTEQPELANKVDMVW | |
| | IVGGSSVYKEAMNHPGHLKLFVTRIMQDFESDTFFPEID | |
| | LEKYKLLPEYPGVLSDVQEEKGIKYKFEVHEEND | |
| hDHFR (V9A, S93R, P150L) | MVGSLNCIAAVSQNMGIGKNGDLPWPPLRNEFRYFQR | 1223 |
| | MTTTSSVEGKQNLVIMGKKTWFSIPEKNRPLKGRINLVL | |
| | SRELKEPPQGAHFLSRRLDDALKLTEQPELANKVDMVW | |
| | IVGGSSVYKEAMNHPGHLKLFVTRIMQDFESDTFFLEID | |
| | LEKYKLLPEYPGVLSDVQEEKGIKYKFENYEKND | |
| hDHFR (I8V, K133E, Y163C) | MVGSLNCVVAVSQNMGIGKNGDLPWPPLRNEFRYFQR | 1224 |
| | MTTTSSVEGKQNLVIMGKKTWFSIPEKNRPLKGRINLVL | |
| | SRELKEPPQGAHFLSRSLDDALKLTEQPELANKVDMVW | |
| | IVGGSSVYKEAMNHPGHLELFVTRIMQDFESDTFFPEID | |
| | LEKYKLLPECPGVLSDVQEEKGIKYKFEVYEKND | |
| hDHFR (L23S, V121A, Y157C) | MVGSLNCIVAVSQNMGIGKNGDSPWPPLRNEFRYFQR | 1224 |
| | MTTTSSVEGKQNLVIMGKKTWFSIPEKNRPLKGRINLVL | |
| | SRELKEPPQGAHFLSRSLDDALKLTEQPELANKVDMVW | |
| | IVGGSSAYKEAMNHPGHLKLFVTRIMQDFESDTFFPEID | |
| | LEKCKLLPEYPGVLSDVQEEKGIKYKFEVYEKND | |
| hDHFR (K19E, F89L, E181G) | MVGSLNCIVAVSQNMGIGENGDLPWPPLRNEFRYFQRM | 1226 |
| | TTTSSVEGKQNLVIMGKKTWFSIPEKNRPLKGRINLVLS | |
| | RELKEPPQGAHLLSRSLDDALKLTEQPELANKVDMVWI | |
| | VGGSSVYKEAMNHPGHLKLFVTRIMQDFESDTFFPEIDL | |
| | EKYKLLPEYPGVLSDVQEEKGIKYKFGVYEKND | |
| hDHFR (Q36F, N65F, Y122I) | MVGSLNCIVAVSQNMGIGKNGDLPWPPLRNEFRYFFRM | 1227 |
| | TTTSSVEGKQNLVIMGKKTWFSIPEKFRPLKGRINLVLS | |
| | RELKEPPQGAHFLSRSLDDALKLTEQPELANKVDMVWI | |
| | VGGSSVIKEAMNHPGHLKLFVTRIMQDFESDTFFPEIDL | |
| | EKYKLLPEYPGVLSDVQEEKGIKYKFEVYEKND | |
| hDHFR (G54R, M140V, S168C) | MVGSLNCIVAVSQNMGIGKNGDLPWPPLRNEFRYFQR | 1228 |
| | MTTTSSVEGKQNLVIMRKKTWFSIPEKNRPLKGRINLVL | |
| | SRELKEPPQGAHFLSRSLDDALKLTEQPELANKVDMVW | |
| | IVGGSSVYKEAMNHPGHLKLFVTRIVQDFESDTFFPEIDL | |
| | EKYKLLPEYPGVLCDVQEEKGIKYKFEVYEKND | |
| hDHFR (V110A, V136M, K177R) | MVGSLNCIVAVSQNMGIGKNGDLPWPPLRNEFRYFQR | 1229 |
| | MTTTSSVEGKQNLVIMGKKTWFSIPEKNRPLKGRINLVL | |
| | SRELKEPPQGAHFLSRSLDDALKLTEQPELANKADMVW | |
| | IVGGSSVYKEAMNHPGHLKLFMTRIMQDFESDTFFPEID | |
| | LEKYKLLPEYPGVLSDVQEEKGIRYKFEVYEKND | |
| hDHFR (Amino acid 2-187 of WT; | VGSLNCIVAVSQNMGIGKNGDLPWPPLRNEFRYFFRMT | 1230 |
| Q36F, Y122I, A125F) | TTSSVEGKQNLVIMGKKTWFSIPEKNRPLKGRINLVLSR | |
| | ELKEPPQGAHFLSRSLDDALKLTEQPELANKVDMVWIV | |
| | GGSSVIKEFMNHPGHLKLFVTRIMQDFESDTFFPEIDLEK | |
| | YKLLPEYPGVLSDVQEEKGIKYKFEVYEKND | |
| hDHFR (N49D, F59S, D153G) | MVGSLNCIVAVSQNMGIGKNGDLPWPPLRNEFRYFQR | 1231 |
| | MTTTSSVEGKQDLVIMGKKTWSSIPEKNRPLKGRINLVL | |
| | SRELKEPPQGAHFLSRSLDDALKLTEQPELANKVDMVW | |
| | IVGGSSVYKEAMNHPGHLKLFVTRIMQDFESDTFFPEIG | |
| | LEKYKLLPEYPGVLSDVQEEKGIKYKFEVYEKND | |
| hDHFR (G21E, I72V, I176T) | MVGSLNCIVAVSQNMGIGKNEDLPWPPLRNEFRYFQRM | 1232 |
| | TTTSSVEGKQNLVIMGKKTWFSIPEKNRPLKGRVNLVLS | |
| | RELKEPPQGAHFLSRSLDDALKLTEQPELANKVDMVWI | |
| | VGGSSVYKEAMNHPGHLKLFVTRIMQDFESDTFFPEIDL | |
| | EKYKLLPEYPGVLSDVQEEKGTKYKFEVYEKND | |
| hDHFR (L100P, E102G, Q103R, | MVGSLNCIVAVSQNMGIGKNGDLPWPPLRNEFRYFQR | |
| P104S, E105G, N108D, V113A, | MTTTSSVEGKQNLVIMGKKTWFSIPEKNRPLKGRINLVL | 1233 |
| W114R, Y122C, M126I, N127R, | SRELKEPPQGAHFLSRSLDDALKPTGRSGLADKVDMAR | |
| H128Y, L132P, F135P, I139T, | IVGGSSVCKEAIRYPGHPKLPVTRTMQDFESDTSLPEVA | |
| F148S, F149L, I152V, D153A, | LEKYKLLPEYPGVLSGAQEEKGARYKFEAYERSD | |
| D169G, V170A, I176A, K177R, | | |
| V182A, K185R, N186S) | | |
| hDHFR (V2A, R33G, Q36R, | MAGSLNCIVAVSQNMGIGKNGDLPWPPLRNEFGYFRR | 1234 |
| L100P, K185R) | MTTTSSVEGKQNLVIMGKKTWFSIPEKNRPLKGRINLVL | |
| | SRELKEPPQGAHFLSRSLDDALKPTEQPELANKVDMVW | |
| | IVGGSSVYKEAMNHPGHLKLFVTRIMQDFESDTFFPEID | |
| | LEKYKLLPEYPGVLSDVQEEKGIKYKFEVYERND | |
| hDHFR (G16S, I17V, F89L, | MVGSLNCIVAVSQNMSVGKNGDLPWPPLRNEFRYFQR | 1235 |
| D96G, K123E, M140V, D146G, | MTTTSSVEGKQNLVIMGKKTWFSIPEKNRPLKGRINLVL | |
| K156R) | SRELKEPPQGAHLLSRSLDGALKLTEQPELANKVDMVW | |
| | IVGGSSVYEEAMNHPGHLKLFVTRIVQDFESGTFFPEIDL | |
| | ERYKLLPEYPGVLSDVQEEKGIKYKFEVYEKND | |
| hDHFR (F35L, R37G, N65A, | MVGSLNCIVAVSQNMGIGKNGDLPWPPLRNEFRYLQG | 1236 |
| L68S, K69E, R71G, L80P, K99G, | MTTTSSVEGKQNLVIMGKKTWFSIPEKARPSEGGINLVL | |
| G117D, L132P, I139V, M140I, | SREPKEPPQGAHFLSRSLDDALGLTEQPELANKVDMVW | |
| D142G, D146G, E173G, D187G) | IVDGSSVYKEAMNHPGHPKLFVTRVIQGFESGTFFPEIDL | |
| | EKYKLLPEYPGVLSDVQEGKGIKYKFEVYEKNG | |
| hDHFR (I17N, L98S, K99R, | MVGSLNCIVAVSQNMGNGKNGDLPWPPLRNEFRYFQR | 1237 |
| M112T, E151G, E162G, E172G) | MTTTSSVEGKQNLVIMGKKTWFSIPEKNRPLKGRINLVL | |
| | SRELKEPPQGAHFLSRSLDDASRLIEQPELANKVDTVWI | |
| | VGGSSVYKEAMNHPGHLKLFVTRIMQDFESDTFFPGIDL | |
| | EKYKLLPGYPGVLSDVQGEKGIKYKFEVYEKND | |
| hDHFR (R138G, D142G, F143S, | MVGSLNCIVAVSQNMGIGKNGDLPWPPLRNEFRYFQR | 1238 |
| K156R, K158E, E162G, V166A, | MTTTSSVEGKQNLVIMGKKTWFSIPEKNRPLKGRINLVL | |
| K177E, Y178C, K185E, N186S) | SRELKEPPQGAHFLSRSLDDALKLTEQPELANKVDMVW | |
| | IVGGSSVYKEAMNHPGHLKLFVTGIMQGSESDTFFPEID | |
| | LERYELLPGYPGALSDVQEEKGIECKFEVYEESD | |
| hDHFR (K81R, K99R, L100P, | MVGSLNCIVAVSQNMGIGKNGDLPWPPLRNEFRYFQR | 1239 |
| E102G, N108D, K123R, H128R, | MTTTSSVEGKQNLVIMGKKTWFSIPEKNRPLKGRINLVL | |
| D142G, F180L, K185E) | SRELREPPQGAHFLSRSLDDALRPTGQPELADKVDMVW | |
| | IVGGSSVYREAMNRPGHLKLFVTRIMQGFESDTFFPEID | |
| | LEKYKLLPEYPGVLSDVQEEKGIKYKLEVYEEND | |
| hDHFR (N14S, P24S, F35L, | MVGSLNCIVAVSQSMGIGKNGDLSWPPLRNEFRYLQRM | 1240 |
| M53T, K56E, R92G, S93G, | TTTSSVEGKQNLVITGKETWFSIPEKNRPLKGRINLVLSR | |
| N127S, H128Y, F135L, F143S, | ELKEPPQGAHFLSGGLDDALKLTEQPELANKVDMVWIV | |
| L159P, L160P, E173A, F180L) | GGSSVYKEAMSYPGHLKLLVTRIMQDSESDTFFPEIDLE | |
| | KYKPPPEYPGVLSDVQEAKGIKYKLEVYEKND | |
| hDHFR (V2A, I17V, N30D, | MAGSLNCIVAVSQNMGVGKNGDLPWPPLRDGFRYFRR | 1241 |
| E31G, Q36R, F59S, K69E, I72T, | MTTTSSVEGKQNLVIMGKKTWSSIPEKNRPLEGRTNLV | |
| H88Y, F89L, N108D, K109E, | LSRELKEPPQGAYLLSRSLDDALKLTEQPELADEAGMV | |
| V110A, I115V, Y122D, L132P, | WVVGGSSVDKEAMNHPGHPKLSVTRIVQDFGSDAFFPE | |
| F135S, M140V, E144G, T147A, | IDLEKCKLLPEYPGVLSDAQEERGIKYKFEVYEKSD | |
| Y157C, V170A, K174R, N186S) | | |
| hDHFR (L28P, N30H, M38V, | MVGSLNCIVAVSQNMGIGKNGDLPWPPPRHEFRYFQRV | 1242 |
| V44A, L68S, N73G, R78G, A97T, | TTTSSAEGKQNLVIMGKKTWFSIPEKNRPSKGRIGLVLS | |
| K99R, A107T, K109R, D111N, | GELKEPPQGAHFLSRSLDDTLRLTEQPELTNRVNMVWI | |
| L134P, F135V, T147A, I152V, | VGGSSVYKEAMNHPGHLRPVVTRIMQDFESDAFFPEVD | |
| K158R, E172G, V182A, E184R) | LEKYRLLPEYPGVLSDVQGEKGIKYKFEAYRKND | |
| hDHFR (A10T, Q13R, N14S, | MVGSLNCIVTVSRSMGIGKDGDLSWPPLRSEFRYFQRTT | 1243 |
| N20D, P24S, N30S, M38T, T40A, | ATSSVEGRQSLVIMGKRTWFSTPERNRPLRGRANLVLS | |
| K47R, N49S, K56R, I61T, K64R, | GELKGPPQGAHLLSRSLDGALKLTEQPELADKVDVVRI | |
| K69R, I72A, R78G, E82G, F89L, | VGGSSVDEEAMNHPGHLKLFVTRVMRGFESDTLFPGID | |
| D96G, N108D, M112V, W114R, | LGKRKLLPEYPGVLSDVREEKGIKYKLEVCGNN | |
| Y122D, K123E, I139V, Q141R, | | |
| D142G, F148L, E151G, E155G, | | |
| Y157R, Q171R, Y183C, E184G, | | |
| K185del, D187N) | | |
| hDHFR (Amino acid 2-187 of WT; | VGSLNCIVAVSQNMGVGKNGDLPWPPLRNEFRYFQRM | 1244 |
| I17V, Y122I) | TTTSSVEGKQNLVIMGKKTWFSIPEKNRPLKGRINLVLS | |
| | RELKEPPQGAHFLSRSLDDALKLTEQPELANKVDMVWI | |
| | VGGSSVIKEAMNHPGHLKLFVTRIMQDFESDTFFPEIDL | |
| | EKYKLLPEYPGVLSDVQEEKGIKYKFEVYEKND | |
| hDHFR (Amino acid 2-187 of WT; | VGSLNCIVAVSQNMGIGKNGDLPWPPLRNEFRYFQRMT | 1245 |
| Y122I, M140I) | TTSSVEGKQNLVIMGKKTWFSIPEKNRPLKGRINLVLSR | |
| | ELKEPPQGAHFLSRSLDDALKLTEQPELANKVDMVWIV | |
| | GGSSVIKEAMNHPGHLKLFVTRIIQDFESDTFFPEIDLEK | |
| | YKLLPEYPGVLSDVQEEKGIKYKFEVYEKND | |
| hDHFR (Amino acid 2-187 of WT; | VGSLNCIVAVSQNMGIGKNGDLPWPPLRNEFRYFQRMT | 1246 |
| N127Y, Y122I) | TTSSVEGKQNLVIMGKKTWFSIPEKNRPLKGRINLVLSR | |
| | ELKEPPQGAHFLSRSLDDALKLTEQPELANKVDMVWIV | |
| | GGSSVIKEAMYHPGHLKLFVTRIMQDFESDTFFPEIDLE | |
| | KYKLLPEYPGVLSDVQEEKGIKYKFEVYEKND | |
| hDHFR (Amino acid 2-187 of WT; | VGSLNCIVAVSQNMGIGKNGDLPWPPLRNEFRYFQRMT | 1196 |
| Y122I, H131R, E144G) | TTSSVEGKQNLVIMGKKTWFSIPEKNRPLKGRINLVLSR | |
| | ELKEPPQGAHFLSRSLDDALKLTEQPELANKVDMVWIV | |
| | GGSSVIKEAMNHPGRLKLFVTRIMQDFGSDTFFPEIDLE | |
| | KYKLLPEYPGVLSDVQEEKGIKYKFEVYEKND | |
| hDHFR (Amino acid 2-187 of WT; | VGSLNCIVAVSQNMGIGKNGSLPWPPLRNEMSYFSRMT | 1248 |
| D22S, F32M, R33S, Q36S, N65S) | TTSSVEGKQNLVIMGKKTWFSIPEKSRPLKGRINLVLSR | |
| | ELKEPPQGAHFLSRSLDDALKLTEQPELANKVDMVWIV | |
| | GGSSVYKEAMNHPGHLKLFVTRIMQDFESDTFFPEIDLE | |
| | KYKLLPEYPGVLSDVQEEKGIKYKFEVYEKND | |
| hDHFR (Amino acid 2-187 of WT; | VGSLNCIVAVSQNMGIGKNGDLPWPPLRNDMRYFQRM | 1249 |
| E31D, F32M, V116I) | TTTSSVEGKQNLVIMGKKTWFSIPEKNRPLKGRINLVLS | |
| | RELKEPPQGAHFLSRSLDDALKLTEQPELANKVDMVWII | |
| | GGSSVYKEAMNHPGHLKLFVTRIMQDFESDTFFPEIDLE | |
| | KYKLLPEYPGVLSDVQEEKGIKYKFEVYEKND | |
| hDHFR (Amino acid 2-187 of WT; | VGSLNCIVAVSQNMGIGKNGDLPWPPLRNEFRYFQRMT | 1250 |
| E162G, I176F) | TTSSVEGKQNLVIMGKKTWFSIPEKNRPLKGRINLVLSR | |
| | ELKEPPQGAHFLSRSLDDALKLTEQPELANKVDMVWIV | |
| | GGSSVYKEAMNHPGHLKLFVTRIMQDFESDTFFPEIDLE | |
| | KYKLLPGYPGVLSDVQEEKGFKYKFEVYEKND | |
| hDHFR (Amino acid 2-187 of WT; | VGSLNCIVAVSQNMGIGKNGDLPWPPLRNEFRYFQRMT | 1251 |
| K185E) | TTSSVEGKQNLVIMGKKTWFSIPEKNRPLKGRINLVLSR | |
| | ELKEPPQGAHFLSRSLDDALKLTEQPELANKVDMVWIV | |
| | GGSSVYKEAMNHPGHLKLFVTRIMQDFESDTFFPEIDLE | |
| | KYKLLPEYPGVLSDVQEEKGIKYKFEVYEEND | |
| hDHFR (Amino acid 2-187 of WT; | VGSLNCIVAVSQNMGIGKNGDLPWPPLRNEFRYFQRMT | 1252 |
| Y122I, A125F) | TTSSVEGKQNLVIMGKKTWFSIPEKNRPLKGRINLVLSR | |
| | ELKEPPQGAHFLSRSLDDALKLTEQPELANKVDMVWIV | |
| | GGSSVIKEFMNHPGHLKLFVTRIMQDFESDTFFPEIDLEK | |
| | YKLLPEYPGVLSDVQEEKGIKYKFEVYEKND | |
| hDHFR (Amino acid 2-187 of WT; | VGSLNCIVAVSQNMGIGKNGDLPWPPLRNEFRYFFRMT | 1253 |
| Q36F, N65F, Y122I) | TTSSVEGKQNLVIMGKKTWFSIPEKFRPLKGRINLVLSR | |
| | ELKEPPQGAHFLSRSLDDALKLTEQPELANKVDMVWIV | |
| | GGSSVIKEAMNHPGHLKLFVTRIMQDFESDTFFPEIDLE | |
| | KYKLLPEYPGVLSDVQEEKGIKYKFEVYEKND | |
| hDHFR (Amino acid 2-187 of WT; | VGSLNCIVAVSQNMGIGKNGDLPWPPLRNEFRYFQRMT | 1254 |
| N127Y) | TTSSVEGKQNLVIMGKKTWFSIPEKNRPLKGRINLVLSR | |
| | ELKEPPQGAHFLSRSLDDALKLTEQPELANKVDMVWIV | |
| | GGSSVYKEAMYHPGHLKLFVTRIMQDFESDTFFPEIDLE | |
| | KYKLLPEYPGVLSDVQEEKGIKYKFEVYEKND | |
| hDHFR (Amino acid 2-187 of WT; | VGSLNCIVAVSQNMGIGKNGDLPWPPLRNEFRYFQRMT | 1255 |
| H131R, E144G) | TTSSVEGKQNLVIMGKKTWFSIPEKNRPLKGRINLVLSR | |
| | ELKEPPQGAHFLSRSLDDALKLTEQPELANKVDMVWIV | |
| | GGSSVYKEAMNHPGRLKLFVTRIMQDFGSDTFFPEIDLE | |
| | KYKLLPEYPGVLSDVQEEKGIKYKFEVYEKND | |
| hDHFR (Amino acid 2-187 of WT; | VGSLNCIVAVSQNMGVGKNGDLPWPPLRNEFRYFQRM | 1256 |
| I17V) | TTTSSVEGKQNLVIMGKKTWFSIPEKNRPLKGRINLVLS | |
| | RELKEPPQGAHFLSRSLDDALKLTEQPELANKVDMVWI | |
| | VGGSSVYKEAMNHPGHLKLFVTRIMQDFESDTFFPEIDL | |
| | EKYKLLPEYPGVLSDVQEEKGIKYKFEVYEKND | |
| hDHFR (Amino acid 2-187 of WT; | VGSLNCIVAVSQNMGIGKNGDLPWPPLRNEFRYFQRMT | 1257 |
| Y122I) | TTSSVEGKQNLVIMGKKTWFSIPEKNRPLKGRINLVLSR | |
| | ELKEPPQGAHFLSRSLDDALKLTEQPELANKVDMVWIV | |
| | GGSSVIKEAMNHPGHLKLFVTRIMQDFESDTFFPEIDLE | |
| | KYKLLPEYPGVLSDVQEEKGIKYKFEVYEKND | |
| hDHFR (E162G, I176F) | MVGSLNCIVAVSQNMGIGKNGDLPWPPLRNEFRYFQR | 1258 |
| | MTTTSSVEGKQNLVIMGKKTWFSIPEKNRPLKGRINLVL | |
| | SRELKEPPQGAHFLSRSLDDALKLTEQPELANKVDMVW | |
| | IVGGSSVYKEAMNHPGHLKLFVTRIMQDFESDTFFPEID | |
| | LEKYKLLPGYPGVLSDVQEEKGFKYKFEVYEKND | |
| hDHFR (Amino acid 2-187 of WT; | VGSLNCIVAVSQNMGIGKNGDLPWPPLRNEFRYFKRMT | 1259 |
| Q36K, Y122I) | TTSSVEGKQNLVIMGKKTWFSIPEKNRPLKGRINLVLSR | |
| | ELKEPPQGAHFLSRSLDDALKLTEQPELANKVDMVWIV | |
| | GGSSVIKEAMNHPGHLKLFVTRIMQDFESDTFFPEIDLE | |
| | KYKLLPEYPGVLSDVQEEKGIKYKFEVYEKND | |

[0384] In one embodiment, the stimulus is a small molecule that binds to a SRE to post-translationally regulate protein levels. In one aspect, DHFR ligands: trimethoprim (TMP) and methotrexate (MTX) are used to stabilize hDHFR mutants. The hDHFR based destabilizing domains are listed in Table 6. The position of the mutated amino acid listed in Table 6 is relative to the human DHFR (Uniprot ID: P00374) of SEQ. ID NO. 4318 for human DHFR. In Table 6, “del” means that the mutation is the deletion of the amino acid at that position relative to the wild type sequence.

[0385] In some embodiments, DD mutations that do not inhibit ligand binding may be preferentially selected. In some embodiments, ligand binding may be improved by mutation of residues in DHFR. Amino acid positions selected for mutation include aspartic acid at position 22 of SEQ ID NO. 4317, glutamic acid at position 31 of SEQ ID NO. 4317; phenyl alanine at position 32 of SEQ ID NO. 4317; arginine at position 33 of SEQ ID NO. 4317; glutamine at position 36 of SEQ ID NO. 4317; asparagine at position 65 of SEQ ID NO. 4317; and valine at position 115 of SEQ ID NO. 4317. In some embodiments, one or more of the following mutations may be utilized in the DDs of the present invention to improve TMP binding, including but not limited to, D22S, E31D, F32M, R33S, Q36S, N65S, and V116I. The position of the mutated amino acids is relative to the wildtype human DHFR (Uniprot ID: P00374) of SEQ ID NO. 4317.

[0386] In some embodiments, novel DDs derived from human DHFR may include one, two, three, four, five or more mutations including, but not limited to, M1del, V2A, C7R, I8V, V9A, A10T, A10V, Q13R, N14S, G16S, I17N, I17V, K19E, N20D, G21T, G21E, D22S, L23S, P24S, L28P, N30D, N30H, N30S, E31G, E31D, F32M, R33G, R33S, F35L, Q36R, Q36S, Q36K, Q36F, R37G, M38V, M38T, T40A, V44A, K47R, N49S, N49D, M53T, G54R, K56E, K56R, T57A, F59S, I61T, K64R, N65A, N65S, N65D, N65F, L68S, K69E, K69R, R71G, I72T, I72A, I72V, N73G, L74N, V75F, R78G, L80P, K81R, E82G, H88Y, F89L, R92G, S93G, S93R, L94A, D96G, A97T, L98S, K99G, K99R, L100P, E102G, Q103R, P104S, E105G, A107T, A107V, N108D, K109E, K109R, V110A, D111N, M112T, M112V, V113A, W114R, I115V, I115L, V116I, G117D, V121A, Y122C, Y122D, Y122I, K123R, K123E, A125F, M126I, N127R, N127S, N127Y, H128R, H128Y, H131R, L132P, K133E, L134P, F135P, F135L, F135S, F135V, V136M, T137R, R138G, R138I, I139T, I139V, M140I, M140V, Q141R, D142G, F143S, F143L, E144G, D146G, T147A, F148S, F148L, F149L, P150L, E151G, I152V, D153A, D153G, E155G, K156R, Y157R, Y157C, K158E, K158R, L159P, L160P, E162G, Y163C, V166A, S168C, D169G, V170A, Q171R, E172G, E173G, E173A, K174R, I176A, I176F, I176T, K177E, K177R, Y178C, Y178H, F180L, E181G, V182A, Y183C, Y183H, E184R, E184G, K185R, K185del, K185E, N186S, N186D, D187G, and D187N.

[0387] In some embodiments, novel DDs derived from human DHFR may comprise amino acids 2-187 of the wild type human DHFR sequence. This may be referred to as an M1del mutation.

[0388] In some embodiments, novel DDs derived from human DHFR may comprise amino acids 2-187 of the wild type human DHFR sequence (also referred to as an M1del mutation), and may include one, two, three, four, five or more mutations including, but not limited to, M1del, V2A, C7R, I8V, V9A, A10T, A10V, Q13R, N14S, G16S, I17N, I17V, K19E, N20D, G21T, G21E, D22S, L23S, P24S, L28P, N30D, N30H, N30S, E31G, E31D, F32M, R33G, R33S, F35L, Q36R, Q36S, Q36K, Q36F, R37G, M38V, M38T, T40A, V44A, K47R, N49S, N49D, M53T, G54R, K56E, K56R, T57A, F59S, I61T, K64R, N65A, N65S, N65D, N65F, L68S, K69E, K69R, R71G, I72T, I72A, I72V, N73G, L74N, V75F, R78G, L80P, K81R, E82G, H88Y, F89L, R92G, S93G, S93R, L94A, D96G, A97T, L98S, K99G, K99R, L100P, E102G, Q103R, P104S, E105G, A107T, A107V, N108D, K109E, K109R, V110A, D111N, M112T, M112V, V113A, W114R, I115V, I115L, V116I, G117D, V121A, Y122C, Y122D, Y122I, K123R, K123E, A125F, M126I, N127R, N127S, N127Y, H128R, H128Y, H131R, L132P, K133E, L134P, F135P, F135L, F135S, F135V, V136M, T137R, R138G, R138I, I139T, I139V, M140I, M140V, Q141R, D142G, F143S, F143L, E144G, D146G, T147A, F148S, F148L, F149L, P150L, E151G, I152V, D153A, D153G, E155G, K156R, Y157R, Y157C, K158E, K158R, L159P, L160P, E162G, Y163C, V166A, S168C, D169G, V170A, Q171R, E172G, E173G, E173A, K174R, I176A, I176F, I176T, K177E, K177R, Y178C, Y178H, F180L, E181G, V182A, Y183C, Y183H, E184R, E184G, K185R, K185del, K185E, N186S, N186D, D187G, and D187N.

[0389] In some embodiments, the DD mutations identified herein, may be mapped to the DHFR sequence to identify mutational hotspots. The DD characteristics may be improved by mutating the amino acids at the hotspot position to any of the known amino acids, including, but not limited to lysine, aspartic acid, glutamic acid, glutamine, asparagine, histidine, serine, threonine, tyrosine, cysteine, methionine, tryptophan, alanine, isoleucine, leucine, phenylalanine, valine, proline, and glycine. In some instances, a library of hotspot mutations may be generated by site directed mutagenesis and each of the mutants in the library is fused to a reporter protein e.g. AcGFP or luciferase via a linker. The properties of the DDs may be analyzed in the presence and absence of ligands such as TMP and MTX. In some embodiments, variant libraries may be generated by methods known in the art. In one embodiment, VariantFind™ may be used to generate variant library. The VariantFind™ platform is a series of multiplex PCRs that mutates multiple amino acid positions simultaneously. Desired mutations are directly encoded by oligonucleotides, providing high control and specificity during the mutagenesis process. These oligonucleotides are combined in a series of sequential PCRs that result in a ready-to-clone DNA library encoding all desired mutations. In one embodiment, any of the codons in the polynucleotides of the invention may be altered by saturation mutagenesis. In another embodiment, a ruleset for amino acid changes may be used to mutate select amino acids of the DDs. In one embodiment, the rule may be the mutation of all Arginine residues in the DD to alanine, lysine and/or leucine. In other embodiments, all phenyl alanine residues in the DD may be mutated to alanine, leucine and/or threonine.

[0390] The destabilization domains described herein may also include amino acid and nucleotide substitutions that do not affect stability, including conservative, non-conservative substitutions and or polymorphisms.

[0391] The PEKN (SEQ ID NO. 1260) sequence that spans from 61-65 amino acids from SEQ ID NO. 1 may be deleted or mutated to alternate amino acids. Comparison of human DHFR sequence with folate reductases of other species has revealed that the “PEKN” (SEQ ID NO. 1260) insertion found in human DHFR serves as a lid over the substrate Dihydrofolate site and is a major determinant blocking interaction of the human DHFR with DHFR inhibitors with specificity to parasitic and bacterial DHFR. Comparative analysis of the dihydrofolate reductase of Mycobacterium tuberculosis and human DHFR revealed that the hDHFR lacks a glycerol (GOL) binding site. The lack of GOL binding site prevents binding with bacterial DHFR inhibitors. In some embodiments, the amino acids equivalent to position tryptophan at position 22, leucine at position 24, aspartic acid at position 27, and glutamine at position 28 of DHFR of M. tuberculosis are inserted into the human DHFR.

[0392] In some embodiments, DD mutations that do not inhibit ligand binding may be preferentially selected. In some embodiments, ligand binding may be improved by mutation of residues in DHFR. Amino acid positions selected for mutation include aspartic acid at position 22 of SEQ ID NO. 1, glutamic acid at position 31 of SEQ ID NO. 1; phenyl alanine at position 32 of SEQ ID NO. 1; arginine at position 33 of SEQ ID NO. 1; glutamine at position 36 of SEQ ID NO. 1; asparagine at position 65 of SEQ ID NO. 1; and valine at position 115 of SEQ ID NO. 1. In some embodiments, one or more of the following mutations may be utilized in the DDs of the present invention to improve TMP binding, including but not limited to, D22S, E31D, F32M, R33S, Q36S, N65S, and V116I. Exemplary DDs that may be tested for improved ligand binding properties include but are not limited to hDHFR (D22S, F32M, R33S, Q36S, N65S) (SEQ ID NO. 4319 (amino acid 2-187 of WT, D22S, F32M, R33S, Q36S, N65S) (encoded by SEQ ID NO. 4320) or SEQ ID NO. 4321 (D22S, F32M, R33S, Q36S, N65S) (encoded by SEQ ID NO. 4322)) and hDHFR (E3ID, F32M, V116I) (SEQ ID NO. 4323 (amino acid 2-187 of WT, E31D, F32M, V116I) (encoded by SEQ ID NO. 4324) or SEQ ID NO. 4325 (E31D, F32M, V116I) (encoded by SEQ ID NO. 4326)). The position of the mutated amino acids is relative to the wildtype human DHFR (Uniprot ID: P00374) of SEQ ID NO. 1.

[0393] In some embodiments, novel DDs derived from human DHFR may include one, two, three, four, five or more mutations including, but not limited to, M1del, V2A, C7R, I8V, V9A, A10T, A10V, Q13R, N14S, G16S, I17N, I17V, K19E, N20D, G21T, G21E, D22S, L23S, P24S, L28P, N30D, N30H, N30S, E31G, E31D, F32M, R33G, R33S, F35L, Q36R, Q36S, Q36K, Q36F, R37G, M38V, M38T, T40A, V44A, K47R, N49S, N49D, M53T, G54R, K56E, K56R, T57A, F59S, I61T, K64R, N65A, N65S, N65D, N65F, L68S, K69E, K69R, R71G, I72T, I72A, I72V, N73G, L74N, V75F, R78G, L80P, K81R, E82G, H88Y, F89L, R92G, S93G, S93R, L94A, D96G, A97T, L98S, K99G, K99R, L100P, E102G, Q103R, P104S, E105G, A107T, A107V, N108D, K109E, K109R, V110A, D111N, M112T, M112V, V113A, W114R, I115V, I115L, V116I, G117D, V121A, Y122C, Y122D, Y122I, K123R, K123E, A125F, M126I, N127R, N127S, N127Y, H128R, H128Y, H131R, L132P, K133E, L134P, F135P, F135L, F135S, F135V, V136M, T137R, R138G, R138I, I139T, I139V, M140I, M140V, Q141R, D142G, F143S, F143L, E144G, D146G, T147A, F148S, F148L, F149L, P150L, E151G, I152V, D153A, D153G, E155G, K156R, Y157R, Y157C, K158E, K158R, L159P, L160P, E162G, Y163C, V166A, S168C, D169G, V170A, Q171R, E172G, E173G, E173A, K174R, I176A, I176F, I176T, K177E, K177R, Y178C, Y178H, F180L, E181G, V182A, Y183C, Y183H, E184R, E184G, K185R, K185del, K185E, N186S, N186D, D187G, and D187N.

[0394] In some embodiments, novel DDs derived from human DHFR may comprise amino acids 2-187 of the wild type human DHFR sequence. This may be referred to as an M1del mutation.

[0395] In some embodiments, novel DDs derived from human DHFR may comprise amino acids 2-187 of the wild type human DHFR sequence (also referred to as an M1del mutation), and may include one, two, three, four, five or more mutations including, but not limited to, M1del, V2A, C7R, I8V, V9A, A10T, A10V, Q13R, N14S, G16S, I17N, I17V, K19E, N20D, G21T, G21E, D22S, L23S, P24S, L28P, N30D, N30H, N30S, E31G, E31D, F32M, R33G, R33S, F35L, Q36R, Q36S, Q36K, Q36F, R37G, M38V, M38T, T40A, V44A, K47R, N49S, N49D, M53T, G54R, K56E, K56R, T57A, F59S, I61T, K64R, N65A, N65S, N65D, N65F, L68S, K69E, K69R, R71G, I72T, I72A, I72V, N73G, L74N, V75F, R78G, L80P, K81R, E82G, H88Y, F89L, R92G, S93G, S93R, L94A, D96G, A97T, L98S, K99G, K99R, L100P, E102G, Q103R, P104S, E105G, A107T, A107V, N108D, K109E, K109R, V110A, D111N, M112T, M112V, V113A, W114R, I115V, I115L, V116I, G117D, V121A, Y122C, Y122D, Y122I, K123R, K123E, A125F, M126I, N127R, N127S, N127Y, H128R, H128Y, H131R, L132P, K133E, L134P, F135P, F135L, F135S, F135V, V136M, T137R, R138G, R138I, I139T, I139V, M140I, M140V, Q141R, D142G, F143S, F143L, E144G, D146G, T147A, F148S, F148L, F149L, P150L, E151G, I152V, D153A, D153G, E155G, K156R, Y157R, Y157C, K158E, K158R, L159P, L160P, E162G, Y163C, V166A, S168C, D169G, V170A, Q171R, E172G, E173G, E173A, K174R, I176A, I176F, I176T, K177E, K177R, Y178C, Y178H, F180L, E181G, V182A, Y183C, Y183H, E184R, E184G, K185R, K185del, K185E, N186S, N186D, D187G, and D187N.

[0396] Newly identified hDHFR mutants are fused to reporter proteins e.g. AcGFP (SEQ ID NO. 4327) and luciferase (SEQ ID NO. 4328, encoded by SEQ ID NO. 4329) through a linker sequence GGSGGGSGG (SEQ ID NO. 3038), GS, SG or GGSGGG (SEQ ID NO. 4330) at either the N-terminal or the C-terminal end of the fusion constructs and cloned into pLVX-IRES-puro vectors. The destabilizing and ligand dependent stabilization properties of the fusion proteins may be evaluated by methods such as western blotting, and FACS. hDHFR mutant fusion constructs are described in Table 7. The amino acid sequences in Table 7 may comprise a stop codon which is denoted in the table with a “*” at the end of the amino acid sequence. The position of the mutated amino acids listed in Table 7 is relative to the wildtype human DHFR (Uniprot ID: P00374) of SEQ ID NO. 1. In Table 7, “del” means that the mutation is the deletion of the amino acid at that position relative to the wild type sequence.

TABLE 7
N terminal and C terminal hDHFR-GFP fusion constructs

| | | | Amino | Nucleic |
|---|---|---|---|---|
| | | | Acid SEQ | Acid SEQ |
| Construct ID | Description | AA Sequence | ID NO | ID NO |
| OT-hDHFR- | hDHFR (WT); | MVGSLNCIVAVSQNMGIGKNGDLPWPPLRNEFRYF | 2738 | 4331 |
| 001 (OT- | Restriction site | QRMTTTSSVEGKQNLVIMGKKTWFSIPEKNRPLKG | | |
| hDHFRN- | (TS); Linker | RINLVLSRELKEPPQGAHFLSRSLDDALKLTEQPEL | | |
| 001) | (GGSGGG | ANKVDMVWIVGGSSVYKEAMNHPGHLKLFVTRIM | | |
| | (SEQ ID NO: | QDFESDTFFPEIDLEKYKLLPEYPGVLSDVQEEKGI | | |
| | 2728)); | KYKFEVYEKNDTSGGSGGGMVSKGAELFTGIVPILI | | |
| | AcGFP; stop | ELNGDVNGHKFSVSGEGEGDATYGKLTLKFICTTG | | |
| | | KLPVPWPTLVTTLSYGVQCFSRYPDHMKQHDFFKS | | |
| | | AMPEGYIQERTIFFEDDGNYKSRAEVKFEGDTLVN | | |
| | | RIELTGTDFKEDGNILGNKMEYNYNAHNVYIMTDK | | |
| | | AKNGIKVNFKIRHNIEDGSVQLADHYQQNTPIGDG | | |
| | | PVLLPDNHYLSTQSALSKDPNEKRDHMIYFGFVTA | | |
| | | AAITHGMDELYK* | | |
| OT-hDHFR- | hDHFR | MVGSLNCIVAVSQNMGIGKNGDLPWPPLRNEFRYF | 1263 | 4332 |
| 002 (OT- | (Y122I); | QRMTTTSSVEGKQNLVIMGKKTWFSIPEKNRPLKG | | |
| hDHFRN- | Restriction site | RINLVLSRELKEPPQGAHFLSRSLDDALKLTEQPEL | | |
| 002) | (TS); Linker | ANKVDMVWIVGGSSVIKEAMNHPGHLKLFVTRIM | | |
| | (GGSGGG | QDFESDTFFPEIDLEKYKLLPEYPGVLSDVQEEKGI | | |
| | (SEQ ID NO: | KYKFEVYEKNDTSGGSGGGMVSKGAELFTGIVPILI | | |
| | 2728)); | ELNGDVNGHKFSVSGEGEGDATYGKLTLKFICTTG | | |
| | AcGFP; stop | KLPVPWPTLVTTLSYGVQCFSRYPDHMKQHDFFKS | | |
| | | AMPEGYIQERTIFFEDDGNYKSRAEVKFEGDTLVN | | |
| | | RIELTGTDFKEDGNILGNKMEYNYNAHNVYIMTDK | | |
| | | AKNGIKVNFKIRHNIEDGSVQLADHYQQNTPIGDG | | |
| | | PVLLPDNHYLSTQSALSKDPNEKRDHMIYFGFVTA | | |
| | | AAITHGMDELYK* | | |
| OT-hDHFR- | hDHFR | MVGSLNCIVAVSQNMGIGKNGDLPWPPLRNEFRYF | 1264 | 4333 |
| 003 (OT- | (M53T, | QRMTTTSSVEGKQNLVITGKKTWFSIPEKNRPLKG | | |
| hDHFRN- | R138I); | RINLVLSRELKEPPQGAHFLSRSLDDALKLTEQPEL | | |
| 003) | Restriction site | ANKVDMVWIVGGSSVYKEAMNHPGHLKLFVTIIM | | |
| | (TS); Linker | QDFESDTFFPEIDLEKYKLLPEYPGVLSDVQEEKGI | | |
| | (GGSGGG | KYKFEVYEKNDTSGGSGGGMVSKGAELFTGIVPILI | | |
| | (SEQ ID NO: | ELNGDVNGHKFSVSGEGEGDATYGKLTLKFICTTG | | |
| | 2728)); | KLPVPWPTLVTTLSYGVQCFSRYPDHMKQHDFFKS | | |
| | AcGFP; stop | AMPEGYIQERTIFFEDDGNYKSRAEVKFEGDTLVN | | |
| | | RIELTGTDFKEDGNILGNKMEYNYNAHNVYIMTDK | | |
| | | AKNGIKVNFKIRHNIEDGSVQLADHYQQNTPIGDG | | |
| | | PVLLPDNHYLSTQSALSKDPNEKRDHMIYFGFVTA | | |
| | | AAITHGMDELYK* | | |
| OT-hDHFR- | hDHFR | MVGSLNCIVAVSQNMGIGKNGDLPWPPLRNEFRYF | 1265 | 4334 |
| 004 (OT- | (V75F, | QRMTTTSSVEGKQNLVIMGKKTWFSIPEKNRPLKG | | |
| hDHFRN- | Y122I); | RINLFLSRELKEPPQGAHFLSRSLDDALKLTEQPEL | | |
| 004) | Restriction site | ANKVDMVWIVGGSSVIKEAMNHPGHLKLFVTRIM | | |
| | (TS); Linker | QDFESDTFFPEIDLEKYKLLPEYPGVLSDVQEEKGI | | |
| | (GGSGGG | KYKFEVYEKNDTSGGSGGGMVSKGAELFTGIVPILI | | |
| | (SEQ ID NO: | ELNGDVNGHKFSVSGEGEGDATYGKLTLKFICTTG | | |
| | 2728)); | KLPVPWPTLVTTLSYGVQCFSRYPDHMKQHDFFKS | | |
| | AcGFP; stop | AMPEGYIQERTIFFEDDGNYKSRAEVKFEGDTLVN | | |
| | | RIELTGTDFKEDGNILGNKMEYNYNAHNVYIMTDK | | |
| | | AKNGIKVNFKIRHNIEDGSVQLADHYQQNTPIGDG | | |
| | | PVLLPDNHYLSTQSALSKDPNEKRDHMIYFGFVTA | | |
| | | AAITHGMDELYK* | | |
| OT-hDHFR- | hDHFR | MVGSLNCIVAVSQNMGIGKNGDLPWPPLRNEFRYF | 1266 | 4335 |
| 005 (OT- | (A125F, | QRMTTTSSVEGKQNLVIMGKKTWFSIPEKNRPLKG | | |
| hDHFRN- | Y122I); | RINLVLSRELKEPPQGAHFLSRSLDDALKLTEQPEL | | |
| 005) | Restriction site | ANKVDMVWIVGGSSVIKEFMNHPGHLKLFVTRIM | | |
| | (TS); Linker | QDFESDTFFPEIDLEKYKLLPEYPGVLSDVQEEKGI | | |
| | (GGSGGG | KYKFEVYEKNDTSGGSGGGMVSKGAELFTGIVPILI | | |
| | (SEQ ID NO: | ELNGDVNGHKFSVSGEGEGDATYGKLTLKFICTTG | | |
| | 2728)); | KLPVPWPTLVTTLSYGVQCFSRYPDHMKQHDFFKS | | |
| | AcGFP; stop | AMPEGYIQERTIFFEDDGNYKSRAEVKFEGDTLVN | | |
| | | RIELTGTDFKEDGNILGNKMEYNYNAHNVYIMTDK | | |
| | | AKNGIKVNFKIRHNIEDGSVQLADHYQQNTPIGDG | | |
| | | PVLLPDNHYLSTQSALSKDPNEKRDHMIYFGFVTA | | |
| | | AAITHGMDELYK* | | |
| OT-hDHFR- | hDHFR | MVGSLNCIVAVSQNMGIGKNGDLPWPPLRNEFRYF | 1267 | 4336 |
| 006 (OT- | (L74N, | QRMTTTSSVEGKQNLVIMGKKTWFSIPEKNRPLKG | | |
| hDHFRN- | Y122I); | RINNVLSRELKEPPQGAHFLSRSLDDALKLTEQPEL | | |
| 006) | Restriction site | ANKVDMVWIVGGSSVIKEAMNHPGHLKLFVTRIM | | |
| | (TS); Linker | QDFESDTFFPEIDLEKYKLLPEYPGVLSDVQEEKGI | | |
| | (GGSGGG | KYKFEVYEKNDTSGGSGGGMVSKGAELFTGIVPILI | | |
| | (SEQ ID NO: | ELNGDVNGHKFSVSGEGEGDATYGKLTLKFICTTG | | |
| | 2728)); | KLPVPWPTLVTTLSYGVQCFSRYPDHMKQHDFFKS | | |
| | AcGFP; stop | AMPEGYIQERTIFFEDDGNYKSRAEVKFEGDTLVN | | |
| | | RIELTGTDFKEDGNILGNKMEYNYNAHNVYIMTDK | | |
| | | AKNGIKVNFKIRHNIEDGSVQLADHYQQNTPIGDG | | |
| | | PVLLPDNHYLSTQSALSKDPNEKRDHMIYFGFVTA | | |
| | | AAITHGMDELYK* | | |
| OT-hDHFR- | hDHFR | MVGSLNCIVAVSQNMGIGKNGDLPWPPLRNEFRYF | 1268 | 4337 |
| 007 (OT- | (L94A, | QRMTTTSSVEGKQNLVIMGKKTWFSIPEKNRPLKG | | |
| hDHFRN- | T147A); | RINLVLSRELKEPPQGAHFLSRSADDALKLTEQPEL | | |
| 007) | Restriction site | ANKVDMVWIVGGSSVYKEAMNHPGHLKLFVTRIM | | |
| | (TS); Linker | QDFESDAFFPEIDLEKYKLLPEYPGVLSDVQEEKGI | | |
| | (GGSGGG | KYKFEVYEKNDTSGGSGGGMVSKGAELFTGIVPILI | | |
| | (SEQ ID NO: | ELNGDVNGHKFSVSGEGEGDATYGKLTLKFICTTG | | |
| | 2728)); stop | KLPVPWPTLVTTLSYGVQCFSRYPDHMKQHDFFKS | | |
| | | AMPEGYIQERTIFFEDDGNYKSRAEVKFEGDTLVN | | |
| | | RIELTGTDFKEDGNILGNKMEYNYNAHNVYIMTDK | | |
| | | AKNGIKVNFKIRHNIEDGSVQLADHYQQNTPIGDG | | |
| | | PVLLPDNHYLSTQSALSKDPNEKRDHMIYFGFVTA | | |
| | | AAITHGMDELYK* | | |
| OT-hDHFR- | hDHFR | MVGSLNCIVAVSQNMGIGKNTDLPWPPLRNEFRYF | 1269 | 4338 |
| 008 (OT- | (G21T, | QRMTTTSSVEGKQNLVIMGKKTWFSIPEKNRPLKG | | |
| hDHFRN- | Y122I); | RINLVLSRELKEPPQGAHFLSRSLDDALKLTEQPEL | | |
| 008) | Restriction site | ANKVDMVWIVGGSSVIKEAMNHPGHLKLFVTRIM | | |
| | (TS); Linker | QDFESDTFFPEIDLEKYKLLPEYPGVLSDVQEEKGI | | |
| | (GGSGGG | KYKFEVYEKNDTSGGSGGGMVSKGAELFTGIVPILI | | |
| | (SEQ ID NO: | ELNGDVNGHKFSVSGEGEGDATYGKLTLKFICTTG | | |
| | 2728)); | KLPVPWPTLVTTLSYGVQCFSRYPDHMKQHDFFKS | | |
| | AcGFP; stop | AMPEGYIQERTIFFEDDGNYKSRAEVKFEGDTLVN | | |
| | | RIELTGTDFKEDGNILGNKMEYNYNAHNVYIMTDK | | |
| | | AKNGIKVNFKIRHNIEDGSVQLADHYQQNTPIGDG | | |
| | | PVLLPDNHYLSTQSALSKDPNEKRDHMIYFGFVTA | | |
| | | AAITHGMDELYK* | | |
| OT-hDHFR- | hDHFR | MVGSLNCIVAVSQNMGIGKNGDLPWPPLRNEFRYF | 1270 | 4339 |
| 009 (OT- | (Q36K, | KRMTTTSSVEGKQNLVIMGKKTWFSIPEKNRPLKG | | |
| hDHFRN- | Y122I); | RINLVLSRELKEPPQGAHFLSRSLDDALKLTEQPEL | | |
| 009) | Restriction site | ANKVDMVWIVGGSSVIKEAMNHPGHLKLFVTRIM | | |
| | (TS); Linker | QDFESDTFFPEIDLEKYKLLPEYPGVLSDVQEEKGI | | |
| | (GGSGGG | KYKFEVYEKNDTSGGSGGGMVSKGAELFTGIVPILI | | |
| | (SEQ ID NO: | ELNGDVNGHKFSVSGEGEGDATYGKLTLKFICTTG | | |
| | 2728)); | KLPVPWPTLVTTLSYGVQCFSRYPDHMKQHDFFKS | | |
| | AcGFP; stop | AMPEGYIQERTIFFEDDGNYKSRAEVKFEGDTLVN | | |
| | | RIELTGTDFKEDGNILGNKMEYNYNAHNVYIMTDK | | |
| | | AKNGIKVNFKIRHNIEDGSVQLADHYQQNTPIGDG | | |
| | | PVLLPDNHYLSTQSALSKDPNEKRDHMIYFGFVTA | | |
| | | AAITHGMDELYK* | | |
| OT-hDHFR- | hDHFR | MVGSLNCIVAVSQNMGIGKNGDLPWPPLRNEFRYF | 1271 | 4340 |
| 010 (OT- | (Q36F, N65F, | KRMTTTSSVEGKQNLVIMGKKTWFSIPEKFRPLKG | | |
| hDHFRN- | Y122I); | RINLVLSRELKEPPQGAHFLSRSLDDALKLTEQPEL | | |
| 010) | Restriction site | ANKVDMVWIVGGSSVIKEAMNHPGHLKLFVTRIM | | |
| | (TS); Linker | QDFESDTFFPEIDLEKYKLLPEYPGVLSDVQEEKGI | | |
| | (GGSGGG | KYKFEVYEKNDTSGGSGGGMVSKGAELFTGIVPILI | | |
| | (SEQ ID NO: | ELNGDVNGHKFSVSGEGEGDATYGKLTLKFICTTG | | |
| | 2728)); | KLPVPWPTLVTTLSYGVQCFSRYPDHMKQHDFFKS | | |
| | AcGFP; stop | AMPEGYIQERTIFFEDDGNYKSRAEVKFEGDTLVN | | |
| | | RIELTGTDFKEDGNILGNKMEYNYNAHNVYIMTDK | | |
| | | AKNGIKVNFKIRHNIEDGSVQLADHYQQNTPIGDG | | |
| | | PVLLPDNHYLSTQSALSKDPNEKRDHMIYFGFVTA | | |
| | | AAITHGMDELYK* | | |
| OT-hDHFR- | AcGFP; | MVGSLNCIVAVSQNMGIGKNGDLPWPPLRNEFRYF | 1272 | 4341 |
| 021 (OT- | Restriction site | QRMTTTSSVEGKQNLVIMGKKTWFSIPEKNRPLKG | | |
| hDHFRN- | (TS); Linker | RINLVLSRELKEPPQGAHFLSRSLDDALKLTEQPEL | | |
| 021) | (GGSGGG | ANKVDMVWIVGGSSAIKEAMNHPGHLKLFVTRIM | | |
| | (SEQ ID NO: | QDFESDTFFPEIDLEKYKLLPEYPGVLSDVQEEKGI | | |
| | 2728)); | KYKFEVYEKNDTSGGSGGGMVSKGAELFTGIVPILI | | |
| | hDHFR | ELNGDVNGHKFSVSGEGEGDATYGKLTLKFICTTG | | |
| | (Q36K, | KLPVPWPTLVTTLSYGVQCFSRYPDHMKQHDFFKS | | |
| | Y122I); stop | AMPEGYIQERTIFFEDDGNYKSRAEVKFEGDTLVN | | |
| | | RIELTGTDFKEDGNILGNKMEYNYNAHNVYIMTDK | | |
| | | AKNGIKVNFKIRHNIEDGSVQLADHYQQNTPIGDG | | |
| | | PVLLPDNHYLSTQSALSKDPNEKRDHMIYFGFVTA | | |
| | | AAITHGMDELYK* | | |
| OT-hDHFR- | AcGFP; | MVSKGAELFTGIVPILIELNGDVNGHKFSVSGEGEG | 1187 | 4342 |
| 011 (OT- | Linker | DATYGKLTLKFICTTGKLPVPWPTLVTTLSYGVQC | | |
| hDHFRC- | (GGSGGG | FSRYPDHMKQHDFFKSAMPEGYIQERTIFFEDDGN | | |
| 011) | (SEQ ID NO: | YKSRAEVKFEGDTLVNRIELTGTDFKEDGNILGNK | | |
| | 2728)); | MEYNYNAHNVYIMTDKAKNGIKVNFKIRHNIEDGS | | |
| | Restriction site | VQLADHYQQNTPIGDGPVLLPDNHYLSTQSALSKD | | |
| | (TS); hDHFR | PNEKRDHMIYFGFVTAAAITHGMDELYKGGSGGG | | |
| | (amino acid 2- | TSVGSLNCIVAVSQNMGIGKNGDLPWPPLRNEFRY | | |
| | 187 of WT); | FQRMTTTSSVEGKQNLVIMGKKTWFSIPEKNRPLK | | |
| | stop | GRINLVLSRELKEPPQGAHFLSRSLDDALKLTEQPE | | |
| | | LANKVDMVWIVGGSSVYKEAMNHPGHLKLFVTRI | | |
| | | MQDFESDTFFPEIDLEKYKLLPEYPGVLSDVQEEKG | | |
| | | IKYKFEVYEKND* | | |
| OT-hDHFR- | AcGFP; | MVSKGAELFTGIVPILIELNGDVNGHKFSVSGEGEG | 1273 | 4343 |
| 012 (OT- | Linker | DATYGKLTLKFICTTGKLPVPWPTLVTTLSYGVQC | | |
| hDHFRC- | (GGSGGG | FSRYPDHMKQHDFFKSAMPEGYIQERTIFFEDDGN | | |
| 012) | (SEQ ID NO: | YKSRAEVKFEGDTLVNRIELTGTDFKEDGNILGNK | | |
| | 2728)); | MEYNYNAHNVYIMTDKAKNGIKVNFKIRHNIEDGS | | |
| | Restriction site | VQLADHYQQNTPIGDGPVLLPDNHYLSTQSALSKD | | |
| | (TS); hDHFR | PNEKRDHMIYFGFVTAAAITHGMDELYKGGSGGG | | |
| | (Amino acid 2- | TSVGSLNCIVAVSQNMGIGKNGDLPWPPLRNEFRY | | |
| | 187 of WT) | FQRMTTTSSVEGKQNLVIMGKKTWFSIPEKNRPLK | | |
| | (Y122I); stop | GRINLVLSRELKEPPQGAHFLSRSLDDALKLTEQPE | | |
| | | LANKVDMVWIVGGSSVIKEAMNHPGHLKLFVTRI | | |
| | | MQDFESDTFFPEIDLEKYKLLPEYPGVLSDVQEEKG | | |
| | | IKYKFEVYEKND* | | |
| OT-hDHFR- | AcGFP; | MVSKGAELFTGIVPILIELNGDVNGHKFSVSGEGEG | 1274 | 4344 |
| 013 (OT- | Linker | DATYGKLTLKFICTTGKLPVPWPTLVTTLSYGVQC | | |
| hDHFRC- | (GGSGGG | FSRYPDHMKQHDFFKSAMPEGYIQERTIFFEDDGN | | |
| 013) | (SEQ ID NO: | YKSRAEVKFEGDTLVNRIELTGTDFKEDGNILGNK | | |
| | 2728)); | MEYNYNAHNVYIMTDKAKNGIKVNFKIRHNIEDGS | | |
| | Restriction site | VQLADHYQQNTPIGDGPVLLPDNHYLSTQSALSKD | | |
| | (TS); hDHFR | PNEKRDHMIYFGFVTAAAITHGMDELYKGGSGGG | | |
| | (Amino acid 2- | TSVGSLNCIVAVSQNMGIGKNGDLPWPPLRNEFRY | | |
| | 187 of WT) | FQRMTTTSSVEGKQNLVITGKKTWFSIPEKNRPLKG | | |
| | (M53T, | RINLVLSRELKEPPQGAHFLSRSLDDALKLTEQPEL | | |
| | R138I); stop | ANKVDMVWIVGGSSVYKEAMNHPGHLKLFVTIIM | | |
| | | QDFESDTFFPEIDLEKYKLLPEYPGVLSDVQEEKGI | | |
| | | KYKFEVYEKND* | | |
| OT-hDHFR- | AcGFP; | MVSKGAELFTGIVPILIELNGDVNGHKFSVSGEGEG | 1275 | 4345 |
| 014 (OT- | Linker | DATYGKLTLKFICTTGKLPVPWPTLVTTLSYGVQC | | |
| hDHFRC- | (GGSGGG | FSRYPDHMKQHDFFKSAMPEGYIQERTIFFEDDGN | | |
| 014) | (SEQ ID NO: | YKSRAEVKFEGDTLVNRIELTGTDFKEDGNILGNK | | |
| | 2728)); | MEYNYNAHNVYIMTDKAKNGIKVNFKIRHNIEDGS | | |
| | Restriction site | VQLADHYQQNTPIGDGPVLLPDNHYLSTQSALSKD | | |
| | (TS); hDHFR | PNEKRDHMIYFGFVTAAAITHGMDELYKGGSGGG | | |
| | (Amino acid 2- | TSVGSLNCIVAVSQNMGIGKNGDLPWPPLRNEFRY | | |
| | 187 of WT) | FQRMTTTSSVEGKQNLVIMGKKTWFSIPEKNRPLK | | |
| | (V75F, | GRINLFLSRELKEPPQGAHFLSRSLDDALKLTEQPE | | |
| | Y122I); stop | LANKVDMVWIVGGSSVIKEAMNHPGHLKLFVTRI | | |
| | | MQDFESDTFFPEIDLEKYKLLPEYPGVLSDVQEEKG | | |
| | | IKYKFEVYEKND* | | |
| OT-hDHFR- | AcGFP; | MVSKGAELFTGIVPILIELNGDVNGHKFSVSGEGEG | 1276 | 4346 |
| 015 (OT- | Linker | DATYGKLTLKFICTTGKLPVPWPTLVTTLSYGVQC | | |
| hDHFRC- | (GGSGGG | FSRYPDHMKQHDFFKSAMPEGYIQERTIFFEDDGN | | |
| 015) | (SEQ ID NO: | YKSRAEVKFEGDTLVNRIELTGTDFKEDGNILGNK | | |
| | 2728)); | MEYNYNAHNVYIMTDKAKNGIKVNFKIRHNIEDGS | | |
| | Restriction site | VQLADHYQQNTPIGDGPVLLPDNHYLSTQSALSKD | | |
| | (TS); hDHFR | PNEKRDHMIYFGFVTAAAITHGMDELYKGGSGGG | | |
| | (Amino acid 2- | TSVGSLNCIVAVSQNMGIGKNGDLPWPPLRNEFRY | | |
| | 187 of WT) | FQRMTTTSSVEGKQNLVIMGKKTWFSIPEKNRPLK | | |
| | (A125F, | GRINLVLSRELKEPPQGAHFLSRSLDDALKLTEQPE | | |
| | Y122I); stop | LANKVDMVWIVGGSSVIKEFMNHPGHLKLFVTRI | | |
| | | MQDFESDTFFPEIDLEKYKLLPEYPGVLSDVQEEKG | | |
| | | IKYKFEVYEKND* | | |
| OT-hDHFR- | AcGFP; | MVSKGAELFTGIVPILIELNGDVNGHKFSVSGEGEG | 1277 | 4347 |
| 016 (OT- | Linker | DATYGKLTLKFICTTGKLPVPWPTLVTTLSYGVQC | | |
| hDHFRC- | (GGSGGG | FSRYPDHMKQHDFFKSAMPEGYIQERTIFFEDDGN | | |
| 016) | (SEQ ID NO: | YKSRAEVKFEGDTLVNRIELTGTDFKEDGNILGNK | | |
| | 2728)); | MEYNYNAHNVYIMTDKAKNGIKVNFKIRHNIEDGS | | |
| | Restriction site | VQLADHYQQNTPIGDGPVLLPDNHYLSTQSALSKD | | |
| | (TS); hDHFR | PNEKRDHMIYFGFVTAAAITHGMDELYKGGSGGG | | |
| | (Amino acid 2- | TSVGSLNCIVAVSQNMGIGKNGDLPWPPLRNEFRY | | |
| | 187 of WT) | FQRMTTTSSVEGKQNLVIMGKKTWFSIPEKNRPLK | | |
| | (L74N, | GRINNVLSRELKEPPQGAHFLSRSLDDALKLTEQPE | | |
| | Y122I); stop | LANKVDMVWIVGGSSVIKEAMNHPGHLKLFVTRI | | |
| | | MQDFESDTFFPEIDLEKYKLLPEYPGVLSDVQEEKG | | |
| | | IKYKFEVYEKND* | | |
| OT-hDHFR- | AcGFP; | MVSKGAELFTGIVPILIELNGDVNGHKFSVSGEGEG | 1278 | 4348 |
| 017 (OT- | Linker | DATYGKLTLKFICTTGKLPVPWPTLVTTLSYGVQC | | |
| hDHFRC- | (GGSGGG | FSRYPDHMKQHDFFKSAMPEGYIQERTIFFEDDGN | | |
| Y017) | (SEQ ID NO: | KSRAEVKFEGDTLVNRIELTGTDFKEDGNILGNK | | |
| | 2728)); | MEYNYNAHNVYIMTDKAKNGIKVNFKIRHNIEDGS | | |
| | Restriction site | VQLADHYQQNTPIGDGPVLLPDNHYLSTQSALSKD | | |
| | (TS); hDHFR | PNEKRDHMIYFGFVTAAAITHGMDELYKGGSGGG | | |
| | (Amino acid 2- | TSVGSLNCIVAVSQNMGIGKNGDLPWPPLRNEFRY | | |
| | 187 of WT) | FQRMTTTSSVEGKQNLVIMGKKTWFSIPEKNRPLK | | |
| | (L94A, | GRINLVLSRELKEPPQGAHFLSRSADDALKLTEQPE | | |
| | T147A); stop | LANKVDMVWIVGGSSVYKEAMNHPGHLKLFVTRI | | |
| | | MQDFESDAFFPEIDLEKYKLLPEYPGVLSDVQEEKG | | |
| | | IKYKFEVYEKND* | | |
| OT-hDHFR- | AcGFP; | MVSKGAELFTGIVPILIELNGDVNGHKFSVSGEGEG | 1279 | 4349 |
| 018 (OT- | Linker | DATYGKLTLKFICTTGKLPVPWPTLVTTLSYGVQC | | |
| hDHFRC- | (GGSGGG | FSRYPDHMKQHDFFKSAMPEGYIQERTIFFEDDGN | | |
| 018) | (SEQ ID NO: | YKSRAEVKFEGDTLVNRIELTGTDFKEDGNILGNK | | |
| | 2728)); | MEYNYNAHNVYIMTDKAKNGIKVNFKIRHNIEDGS | | |
| | Restriction site | VQLADHYQQNTPIGDGPVLLPDNHYLSTQSALSKD | | |
| | (TS); hDHFR | PNEKRDHMIYFGFVTAAAITHGMDELYKGGSGGG | | |
| | (Amino acid 2- | TSVGSLNCIVAVSQNMGIGKNTDLPWPPLRNEFRY | | |
| | 187 of WT) | FQRMTTTSSVEGKQNLVIMGKKTWFSIPEKNRPLK | | |
| | (G21T, | GRINLVLSRELKEPPQGAHFLSRSLDDALKLTEQPE | | |
| | Y122I); stop | LANKVDMVWIVGGSSVIKEAMNHPGHLKLFVTRI | | |
| | | MQDFESDTFFPEIDLEKYKLLPEYPGVLSDVQEEKG | | |
| | | IKYKFEVYEKND* | | |
| OT-hDHFR- | AcGFP; | MVSKGAELFTGIVPILIELNGDVNGHKFSVSGEGEG | 1280 | 4350 |
| 019 (OT- | Linker | DATYGKLTLKFICTTGKLPVPWPTLVTTLSYGVQC | | |
| hDHFRC- | (GGSGGG | FSRYPDHMKQHDFFKSAMPEGYIQERTIFFEDDGN | | |
| 019) | (SEQ ID NO: | YKSRAEVKFEGDTLVNRIELTGTDFKEDGNILGNK | | |
| | 2728)); | MEYNYNAHNVYIMTDKAKNGIKVNFKIRHNIEDGS | | |
| | Restriction site | VQLADHYQQNTPIGDGPVLLPDNHYLSTQSALSKD | | |
| | (TS); hDHFR | PNEKRDHMIYFGFVTAAAITHGMDELYKGGSGGG | | |
| | (Amino acid 2- | TSVGSLNCIVAVSQNMGIGKNGDLPWPPLRNEFRY | | |
| | 187 of WT) | FKRMTTTSSVEGKQNLVIMGKKTWFSIPEKNRPLK | | |
| | (Q36K, | GRINLVLSRELKEPPQGAHFLSRSLDDALKLTEQPE | | |
| | Y122I); stop | LANKVDMVWIVGGSSVIKEAMNHPGHLKLFVTRI | | |
| | | MQDFESDTFFPEIDLEKYKLLPEYPGVLSDVQEEKG | | |
| | | IKYKFEVYEKND* | | |
| OT-hDHFR- | AcGFP; | MVSKGAELFTGIVPILIELNGDVNGHKFSVSGEGEG | 1281 | 4351 |
| 020 (OT- | Linker | DATYGKLTLKFICTTGKLPVPWPTLVTTLSYGVQC | | |
| hDHFRC- | (GGSGGG | FSRYPDHMKQHDFFKSAMPEGYIQERTIFFEDDGN | | |
| 020) | (SEQ ID NO: | YKSRAEVKFEGDTLVNRIELTGTDFKEDGNILGNK | | |
| | 2728)); | MEYNYNAHNVYIMTDKAKNGIKVNFKIRHNIEDGS | | |
| | Restriction site | VQLADHYQQNTPIGDGPVLLPDNHYLSTQSALSKD | | |
| | (TS); hDHFR | PNEKRDHMIYFGFVTAAAITHGMDELYKGGSGGG | | |
| | (Amino acid 2- | TSVGSLNCIVAVSQNMGIGKNGDLPWPPLRNEFRY | | |
| | 187 of WT) | FKRMTTTSSVEGKQNLVIMGKKTWFSIPEKNRPLK | | |
| | (Q36K, | GRINLVLSRELKEPPQGAHFLSRSLDDALKLTEQPE | | |
| | Y122I); stop | LANKVDMVWIVGGSSVIKEAMNHPGHLKLFVTRI | | |
| | | MQDFESDTFFPEIDLEKYKLLPEYPGVLSDVQEEKG | | |
| | | IKYKFEVYEKND* | | |
| OT-hDHFR- | AcGFP; | MVSKGAELFTGIVPILIELNGDVNGHKFSVSGEGEG | 1282 | 4352 |
| 022 (OT- | Linker | DATYGKLTLKFICTTGKLPVPWPTLVTTLSYGVQC | | |
| hDHFRC- | (GGSGGG | FSRYPDHMKQHDFFKSAMPEGYIQERTIFFEDDGN | | |
| 022) | (SEQ ID NO: | YKSRAEVKFEGDTLVNRIELTGTDFKEDGNILGNK | | |
| | 2728)); | MEYNYNAHNVYIMTDKAKNGIKVNFKIRHNIEDGS | | |
| | Restriction site | VQLADHYQQNTPIGDGPVLLPDNHYLSTQSALSKD | | |
| | (TS); hDHFR | PNEKRDHMIYFGFVTAAAITHGMDELYKGGSGGG | | |
| | (Amino acid 2- | TSVGSLNCIVAVSQNMGIGKNGDLPWPPLRNEFRY | | |
| | 187 of WT) | FQRMTTTSSVEGKQNLVIMGKKTWFSIPEKNRPLK | | |
| | (V121A, | GRINLVLSRELKEPPQGAHFLSRSLDDALKLTEQPE | | |
| | Y122I); stop | LANKVDMVWIVGGSSAIKEAMNHPGHLKLFVTRI | | |
| | | MQDFESDTFFPEIDLEKYKLLPEYPGVLSDVQEEKG | | |
| | | IKYKFEVYEKND* | | |
| OT-hDHFR- | AcGFP. Linker | MVSKGAELFTGIVPILIELNGDVNGHKFSVSGEGEG | 1283 | 4353 |
| 027 (OT- | (GGSGGG | DATYGKLTLKFICTTGKLPVPWPTLVTTLSYGVQC | | |
| hDHFRC- | (SEQ ID NO: | FSRYPDHMKQHDFFKSAMPEGYIQERTIFFEDDGN | | |
| 027) | 2728))- | YKSRAEVKFEGDTLVNRIELTGTDFKEDGNILGNK | | |
| | Restriction site | MEYNYNAHNVYIMTDKAKNGIKVNFKIRHNIEDGS | | |
| | (TS); hDHFR | VQLADHYQQNTPIGDGPVLLPDNHYLSTQSALSKD | | |
| | (Amino acid 2- | PNEKRDHMIYFGFVTAAAITHGMDELYKGGSGGG | | |
| | 187 of WT) | TSVGSLNCIVAVSQNMGIGKNGSLPWPPLRNEMSY | | |
| | (D22S, F32M, | FSRMTTTSSVEGKQNLVIMGKKTWFSIPEKSRPLKG | | |
| | R33S, Q36S, | RINLVLSRELKEPPQGAHFLSRSLDDALKLTEQPEL | | |
| | N65S); stop | ANKVDMVWIVGGSSVYKEAMNHPGHLKLFVTRIM | | |
| | | QDFESDTFFPEIDLEKYKLLPEYPGVLSDVQEEKGI | | |
| | | KYKFEVYEKND* | | |
| OT-hDHFR- | AcGFP; | MVSKGAELFTGIVPILIELNGDVNGHKFSVSGEGEG | 1284 | 4354 |
| 028 (OT- | Linker | DATYGKLTLKFICTTGKLPVPWPTLVTTLSYGVQC | | |
| hDHFRC- | (GGSGGG | FSRYPDHMKQHDFFKSAMPEGYIQERTIFFEDDGN | | |
| 028) | (SEQ ID NO: | YKSRAEVKFEGDTLVNRIELTGTDFKEDGNILGNK | | |
| | 2728))- | MEYNYNAHNVYIMTDKAKNGIKVNFKIRHNIEDGS | | |
| | Restriction site | VQLADHYQQNTPIGDGPVLLPDNHYLSTQSALSKD | | |
| | (TS); hDHFR | PNEKRDHMIYFGFVTAAAITHGMDELYKGGSGGG | | |
| | (Amino acid 2- | TSVGSLNCIVAVSQNMGIGKNGDLPWPPLRNDMR | | |
| | 187 of WT) | YFQRMTTTSSVEGKQNLVIMGKKTWFSIPEKNRPL | | |
| | (E31D, F32M, | KGRINLVLSRELKEPPQGAHFLSRSLDDALKLTEQP | | |
| | V116I); stop | ELANKVDMVWIIGGSSVYKEAMNHPGHLKLFVTRI | | |
| | | MQDFESDTFFPEIDLEKYKLLPEYPGVLSDVQEEKG | | |
| | | IKYKFEVYEKND* | | |
| OT-hDHFR- | AcGFP; | MVSKGAELFTGIVPILIELNGDVNGHKFSVSGEGEG | 1285 | 4355 |
| 029 (OT- | Linker | DATYGKLTLKFICTTGKLPVPWPTLVTTLSYGVQC | | |
| hDHFRC- | (GGSGGG | FSRYPDHMKQHDFFKSAMPEGYIQERTIFFEDDGN | | |
| 029) | (SEQ ID NO: | YKSRAEVKFEGDTLVNRIELTGTDFKEDGNILGNK | | |
| | 2728))- | MEYNYNAHNVYIMTDKAKNGIKVNFKIRHNIEDGS | | |
| | Restriction site | VQLADHYQQNTPIGDGPVLLPDNHYLSTQSALSKD | | |
| | (TS); hDHFR | PNEKRDHMIYFGFVTAAAITHGMDELYKGGSGGG | | |
| | (Amino acid 2- | TSVGSLNCIVAVSQNMGVGKNGDLPWPPLRNEFR | | |
| | 187 of WT) | YFQRMTTTSSVEGKQNLVIMGKKTWFSIPEKNRPL | | |
| | (I17V, Y122I); | KGRINLVLSRELKEPPQGAHFLSRSLDDALKLTEQP | | |
| | stop | ELANKVDMVWIVGGSSVIKEAMNHPGHLKLFVTRI | | |
| | | MQDFESDTFFPEIDLEKYKLLPEYPGVLSDVQEEKG | | |
| | | IKYKFEVYEKND* | | |
| OT-hDHFR- | AcGFP; | MVSKGAELFTGIVPILIELNGDVNGHKFSVSGEGEG | 1286 | 4356 |
| 030 (OT- | Linker | DATYGKLTLKFICTTGKLPVPWPTLVTTLSYGVQC | | |
| hDHFRC- | (GGSGGG | FSRYPDHMKQHDFFKSAMPEGYIQERTIFFEDDGN | | |
| 030) | (SEQ ID NO: | YKSRAEVKFEGDTLVNRIELTGTDFKEDGNILGNK | | |
| | 2728))- | MEYNYNAHNVYIMTDKAKNGIKVNFKIRHNIEDGS | | |
| | Restriction site | VQLADHYQQNTPIGDGPVLLPDNHYLSTQSALSKD | | |
| | (TS); hDHFR | PNEKRDHMIYFGFVTAAAITHGMDELYKGGSGGG | | |
| | (Amino acid 2- | TSVGSLNCIVAVSQNMGIGKNGDLPWPPLRNEFRY | | |
| | 187 of WT) | FQRMTTTSSVEGKQNLVIMGKKTWFSIPEKNRPLK | | |
| | (Y122I, | GRINLVLSRELKEPPQGAHFLSRSLDDALKLTEQPE | | |
| | M140I); stop | LANKVDMVWIVGGSSVIKEAMNHPGHLKLFVTRII | | |
| | | QDFESDTFFPEIDLEKYKLLPEYPGVLSDVQEEKGI | | |
| | | KYKFEVYEKND* | | |
| OT-hDHFR- | AcGFP; | MVSKGAELFTGIVPILIELNGDVNGHKFSVSGEGEG | 1287 | 4357 |
| 031 (OT- | Linker | DATYGKLTLKFICTTGKLPVPWPTLVTTLSYGVQC | | |
| hDHFRC- | (GGSGGG | FSRYPDHMKQHDFFKSAMPEGYIQERTIFFEDDGN | | |
| 031) | (SEQ ID NO: | YKSRAEVKFEGDTLVNRIELTGTDFKEDGNILGNK | | |
| | 2728))- | MEYNYNAHNVYIMTDKAKNGIKVNFKIRHNIEDGS | | |
| | Restriction site | VQLADHYQQNTPIGDGPVLLPDNHYLSTQSALSKD | | |
| | (TS); hDHFR | PNEKRDHMIYFGFVTAAAITHGMDELYKGGSGGG | | |
| | (Amino acid 2- | TSVGSLNCIVAVSQNMGIGKNGDLPWPPLRNEFRY | | |
| | 187 of WT) | FQRMTTTSSVEGKQNLVIMGKKTWFSIPEKNRPLK | | |
| | (N127Y, | GRINLVLSRELKEPPQGAHFLSRSLDDALKLTEQPE | | |
| | Y122I); stop | LANKVDMVWIVGGSSVIKEAMYHPGHLKLFVTRI | | |
| | | MQDFESDTFFPEIDLEKYKLLPEYPGVLSDVQEEKG | | |
| | | IKYKFEVYEKND* | | |
| OT-hDHFR- | AcGFP; | MVSKGAELFTGIVPILIELNGDVNGHKFSVSGEGEG | 1288 | 4358 |
| 032 (OT- | Linker | DATYGKLTLKFICTTGKLPVPWPTLVTTLSYGVQC | | |
| hDHFRC- | (GGSGGG | FSRYPDHMKQHDFFKSAMPEGYIQERTIFFEDDGN | | |
| 032) | (SEQ ID NO: | YKSRAEVKFEGDTLVNRIELTGTDFKEDGNILGNK | | |
| | 2728))- | MEYNYNAHNVYIMTDKAKNGIKVNFKIRHNIEDGS | | |
| | Restriction site | VQLADHYQQNTPIGDGPVLLPDNHYLSTQSALSKD | | |
| | (TS); hDHFR | PNEKRDHMIYFGFVTAAAITHGMDELYKGGSGGG | | |
| | (Amino acid 2- | TSVGSLNCIVAVSQNMGIGKNGDLPWPPLRNEFRY | | |
| | 187 of WT) | FQRMTTTSSVEGKQNLVIMGKKTWFSIPEKNRPLK | | |
| | (Y122I, | GRINLVLSRELKEPPQGAHFLSRSLDDALKLTEQPE | | |
| | H131R, | LANKVDMVWIVGGSSVIKEAMNHPGRLKLFVTRI | | |
| | E144G) ; stop | MQDFGSDTFFPEIDLEKYKLLPEYPGVLSDVQEEKG | | |
| | | IKYKFEVYEKND* | | |
| OT-hDHFR- | Luc2p-Linker | MEDAKNIKKGPAPFYPLEDGTAGEQLHKAMKRYA | 1289 | 4359 |
| 023 | (SG)-DHFR | LVPGTIAFTDAHIEVDITYAEYFEMSVRLAEAMKR | | |
| | (Amino acid 2- | YGLNTNHRIVVCSENSLQFFMPVLGALFIGVAVAP | | |
| | 187 of WT) | ANDIYNERELLNSMGISQPTVVFVSKKGLQKILNVQ | | |
| | (N186D); stop | KKLPIIQKIIIMDSKTDYQGFQSMYTFVTSHLPPGFN | | |
| | | EYDFVPESFDRDKTIALIMNSSGSTGLPKGVALPHR | | |
| | | TACVRFSHARDPIFGNQIIPDTAILSVVPFHHGFGMF | | |
| | | TTLGYLICGFRVVLMYRFEEELFLRSLQDYKIQSAL | | |
| | | LVPTLFSFFAKSTLIDKYDLSNLHEIASGGAPLSKEV | | |
| | | GEAVAKRFHLPGIRQGYGLTETTSAILITPEGDDKP | | |
| | | GAVGKVVPFFEAKVVDLDTGKTLGVNQRGELCVR | | |
| | | GPMIMSGYVNNPEATNALIDKDWLHSGDIAYWD | | |
| | | EDEHFFIVDRLKSLIKYKGYQVAPAELESILLQHPNI | | |
| | | FDAGVAGLPDDDAGELPAAVVVLEHGKTMTEKEI | | |
| | | VDYVASQVTTAKKLRGGVVFVDEVPKGLTGKLDA | | |
| | | RKIREILIKAKKGGKIAVSGVGSLNCIVAVSQNMGI | | |
| | | GKNGDLPWPPLRNEFRYFQRMTTTSSVEGKQNLVI | | |
| | | MGKKTWFSIPEKNRPLKGRINLVLSRELKEPPQGA | | |
| | | HFLSRSLDDALKLTEQPELANKVDMVWIVGGSSVY | | |
| | | KEAMNHPGHLKLFVTRIMQDFESDTFFPEIDLEKYK | | |
| | | LLPEYPGVLSDVQEEKGIKYKFEVYEKDD* | | |
| OT-hDHFR- | Luc2p-Linker | MEDAKNIKKGPAPFYPLEDGTAGEQLHKAMKRYA | 1290 | 4360 |
| 024 | (SG)-DHFR | LVPGTIAFTDAHIEVDITYAEYFEMSVRLAEAMKR | | |
| | (Amino acid 2- | YGLNTNHRIVVCSENSLQFFMPVLGALFIGVAVAP | | |
| | 187 of WT) | ANDIYNERELLNSMGISQPTVVFVSKKGLQKILNVQ | | |
| | (M140I); stop | KKLPIIQKIIIMDSKTDYQGFQSMYTFVTSHLPPGFN | | |
| | | EYDFVPESFDRDKTIALIMNSSGSTGLPKGVALPHR | | |
| | | TACVRFSHARDPIFGNQIIPDTAILSVVPFHHGFGMF | | |
| | | TTLGYLICGFRVVLMYRFEEELFLRSLQDYKIQSAL | | |
| | | LVPTLFSFFAKSTLIDKYDLSNLHEIASGGAPLSKEV | | |
| | | GEAVAKRFHLPGIRQGYGLTETTSAILITPEGDDKP | | |
| | | GAVGKVVPFFEAKVVDLDTGKTLGVNQRGELCVR | | |
| | | GPMIMSGYVNNPEATNALIDKDGWLHSGDIAYWD | | |
| | | EDEHFFIVDRLKSLIKYKGYQVAPAELESILLQHPNI | | |
| | | FDAGVAGLPDDDAGELPAAVVVLEHGKTMTEKEI | | |
| | | VDYVASQVTTAKKLRGGVVFVDEVPKGLTGKLDA | | |
| | | RKIREILIKAKKGGKIAVSGVGSLNCIVAVSQNMGI | | |
| | | GKNGDLPWPPLRNEFRYFQRMTTTSSVEGKQNLVI | | |
| | | MGKKTWFSIPEKNRPLKGRINLVLSRELKEPPQGA | | |
| | | HFLSRSLDDALKLTEQPELANKVDMVWIVGGSSVY | | |
| | | KEAMNHPGHLKLFVTRIIQDFESDTFFPEIDLEKYK | | |
| | | LLPEYPGVLSDVQEEKGIKYKFEVYEKND* | | |
| OT-hDHFR- | Luc2p-Linker | MEDAKNIKKGPAPFYPLEDGTAGEQLHKAMKRYA | 1291 | 4361 |
| 025 | (SG)-DHFR | LVPGTIAFTDAHIEVDITYAEYFEMSVRLAEAMKR | | |
| | (Amino acid 2- | YGLNTNHRIVVCSENSLQFFMPVLGALFIGVAVAP | | |
| | 187 of WT) | ANDIYNERELLNSMGISQPTVVFVSKKGLQKILNVQ | | |
| | (N127Y); stop | KKLPIIQKIIIMDSKTDYQGFQSMYTFVTSHLPPGFN | | |
| | | EYDFVPESFDRDKTIALIMNSSGSTGLPKGVALPHR | | |
| | | TACVRFSHARDPIFGNQIIPDTAILSVVPFHHGFGMF | | |
| | | TTLGYLICGFRVVLMYRFEEELFLRSLQDYKIQSAL | | |
| | | LVPTLFSFFAKSTLIDKYDLSNLHEIASGGAPLSKEV | | |
| | | GEAVAKRFHLPGIRQGYGLTETTSAILITPEGDDKP | | |
| | | GAVGKVVPFFEAKVVDLDTGKTLGVNQRGELCVR | | |
| | | GPMIMSGYVNNPEATNALIDKDGWLHSGDIAYWD | | |
| | | EDEHFFIVDRLKSLIKYKGYQVAPAELESILLQHPNI | | |
| | | FDAGVAGLPDDDAGELPAAVVVLEHGKTMTEKEI | | |
| | | VDYVASQVTTAKKLRGGVVFVDEVPKGLTGKLDA | | |
| | | RKIREILIKAKKGGKIAVSGVGSLNCIVAVSQNMGI | | |
| | | GKNGDLPWPPLRNEFRYFQRMTTTSSVEGKQNLVI | | |
| | | MGKKTWFSIPEKNRPLKGRINLVLSRELKEPPQGA | | |
| | | HFLSRSLDDALKLTEQPELANKVDMVWIVGGSSVY | | |
| | | KEAMYHPGHLKLFVTRIMQDFESDTFFPEIDLEKYK | | |
| | | LLPEYPGVLSDVQEEKGIKYKFEVYEKND* | | |
| OT-hDHFR- | Luc2p -Linker | MEDAKNIKKGPAPFYPLEDGTAGEQLHKAMKRYA | 1292 | 4362 |
| 026 | (SG)-DHFR | LVPGTIAFTDAHIEVDITYAEYFEMSVRLAEAMKR | | |
| | (Amino acid 2- | YGLNTNHRIVVCSENSLQFFMPVLGALFIGVAVAP | | |
| | 187 of WT) | ANDIYNERELLNSMGISQPTVVFVSKKGLQKILNVQ | | |
| | (Y122I); stop | KKLPIIQKIIIMDSKTDYQGFQSMYTFVTSHLPPGFN | | |
| | | EYDFVPESFDRDKTIALIMNSSGSTGLPKGVALPHR | | |
| | | TACVRFSHARDPIFGNQIIPDTAILSVVPFHHGFGMF | | |
| | | TTLGYLICGFRVVLMYRFEEELFLRSLQDYKIQSAL | | |
| | | LVPTLFSFFAKSTLIDKYDLSNLHEIASGGAPLSKEV | | |
| | | GEAVAKRFHLPGIRQGYGLTETTSAILITPEGDDKP | | |
| | | GAVGKVVPFFEAKVVDLDTGKTLGVNQRGELCVR | | |
| | | GPMIMSGYVNNPEATNALIDKDGWLHSGDIAYWD | | |
| | | EDEHFFIVDRLKSLIKYKGYQVAPAELESILLQHPNI | | |
| | | FDAGVAGLPDDDAGELPAAVVVLEHGKTMTEKEI | | |
| | | VDYVASQVTTAKKLRGGVVFVDEVPKGLTGKLDA | | |
| | | RKIREILIKAKKGGKIAVSGVGSLNCIVAVSQNMGI | | |
| | | GKNGDLPWPPLRNEFRYFQRMTTTSSVEGKQNLVI | | |
| | | MGKKTWFSIPEKNRPLKGRINLVLSRELKEPPQGA | | |
| | | HFLSRSLDDALKLTEQPELANKVDMVWIVGGSSVI | | |
| | | KEAMNHPGHLKLFVTRIMQDFESDTFFPEIDLEKYK | | |
| | | LLPEYPGVLSDVQEEKGIKYKFEVYEKND* | | |

[0397] DHFR derived DDs described herein and linked to reporter gene e.g. GFP may also be cloned e.g. the protein sequence of SEQ ID NO. 4363, encoded by the nucleotide sequence of SEQ ID NO. 4364 may be cloned into a pLVX-IRES-mcherry vector to generate OT-hDHFR-038, or into a pLVX-P2A-mcherry vector to generate OT-hDHFR-039.

[0398] In one embodiment, the DHFR derived DD may be truncated and the smallest DHFR based DD may be identified. In some embodiments, DHFR DDs described herein may also be fragments of the above destabilizing domains, including fragments containing variant amino acid sequences. Preferred fragments are unstable in the absence of the stimulus and stabilized upon addition of the stimulus. Preferred fragments retain the ability to interact with the stimulus with similar efficiency as the DDs described herein.

[0399] In some embodiments, the hDHFR-derived SRE may be a hDHFR mutant comprising, but not limited to, one, two, three or more mutations selected from M1del, V2A, C7R, I8V, V9A, A10T, A10V, Q13R, N14S, G16S, I17N, I17V, K19E, N20D, G21T, G21E, D22S, L23S, P24S, L28P, N30D, N30H, N30S, E31G, E31D, F32M, R33G, R33S, F35L, Q36R, Q36S, Q36K, Q36F, R37G, M38V, M38T, T40A, V44A, K47R, N49S, N49D, M53T, G54R, K56E, K56R, T57A, F59S, I61T, K64R, N65A, N65S, N65D, N65F, L68S, K69E, K69R, R71G, I72T, I72A, I72V, N73G, L74N, V75F, R78G, L80P, K81R, E82G, H88Y, F89L, R92G, S93G, S93R, L94A, D96G, A97T, L98S, K99G, K99R, L100P, E102G, Q103R, P104S, E105G, A107T, A107V, N108D, K109E, K109R, V110A, D111N, M112T, M112V, V113A, W114R, I115V, I115L, V116I, G117D, V121A, Y122C, Y122D, Y122I, K123R, K123E, A125F, M126I, N127R, N127S, N127Y, H128R, H128Y, H131R, L132P, K133E, L134P, F135P, F135L, F135S, F135V, V136M, T137R, R138G, R138I, I139T, I139V, M140I, M140V, Q141R, D142G, F143S, F143L, E144G, D146G, T147A, F148S, F148L, F149L, P150L, E151G, I152V, D153A, D153G, E155G, K156R, Y157R, Y157C, K158E, K158R, L159P, L160P, E162G, Y163C, V166A, S168C, D169G, V170A, Q171R, E172G, E173G, E173A, K174R, I176A, I176F, I176T, K177E, K177R, Y178C, Y178H, F180L, E181G, V182A, Y183C, Y183H, E184R, E184G, K185R, K185del, K185E, N186S, N186D, D187G, and D187N

### Stimulus

[0400] Biocircuits of the invention are triggered by one or more stimuli. Stimuli may be selected from a ligand, an externally added or endogenous metabolite, the presence or absence of a defined ligand, pH, temperature, light, ionic strength, radioactivity, cellular location, subject site, microenvironment, the presence or the concentration of one or more metal ions.

[0401] In some embodiments, the stimulus is a ligand. Ligands may be nucleic acid-based, protein-based, lipid based, organic, inorganic or any combination of the foregoing. In some embodiments, the ligand is selected from the group consisting of a protein, peptide, nucleic acid, lipid, lipid derivative, sterol, steroid, metabolite derivative and a small molecule. In some embodiments, the stimulus is a small molecule. In some embodiments, the small molecules are cell permeable. Ligands useful in the present invention include without limitation, any of those taught in Table 2 of copending commonly owned U.S. Ser. No. 62/320,864 filed on Apr. 11, 2016 or in U.S. Provisional Application No. 62/466,596 filed Mar. 3, 2017 and the International Publication WO2017/180587, the contents of each of which are incorporated herein by reference in their entirety. In some embodiments, the small molecules are FDA-approved, safe and orally administered.

[0402] In some embodiments, the ligand binds to dihydrofolate reductase. In some embodiments, the ligand binds to and inhibits dihydrofolate reductase function and is herein referred to as a dihydrofolate inhibitor.

[0403] In some embodiments, the ligand may be a selective inhibitor of human DHFR. Ligands of the invention may also be selective inhibitors of dihydrofolate reductases of bacteria and parasitic organisms such as Pneumocystis spp., Toxoplasma spp., Trypanosoma spp., Mycobacterium spp., and Streptococcus spp. Ligands specific to other DHFR may be modified to improve binding to human dihydrofolate reductase.

[0404] Examples of dihydrofolate inhibitors include, but are not limited to, Trimethoprim (TMP), Methotrexate (MTX), Pralatrexate, Piritrexim Pyrimethamine, Talotrexin, Chloroguanide, Pentamidine, Trimetrexate, aminopterin, C1 898 trihydrochloride, Pemetrexed Disodium, Raltitrexed, Sulfaguanidine, Folotyn, Iclaprim and Diaveridine. Other examples of DHFR inhibitors include BAL0030543, BAL0030544 and BAL0030545, developed by Basillea Pharmaceuticals; as well as WR 99210, and P218. Any of the inhibitors described by Zhang Q et al. (2015) Int J Antimicrob Agents. 2015 August; 46(2): 174-182 (the contents of which are incorporated herein by reference in their entirety). Some inhibitors contain bulky benzyl groups that dramatically diminish binding to human DHFR. In some embodiments, the inhibitors may be designed without bulky benzyl groups to improve TMP binding.

[0405] In some embodiments, ligands of the present invention may be polyglutamate or non polyglutamylatable. Like naturally occurring folates, polyglutamatable folates also contain a glutamic acid residue and therefore undergo intracellular polyglutamylation. In contrast, non-polyglutamatable antifolates are devoid of a glutamate residue and thus are not available for polyglutamylation. In some embodiments, polyglutamylatable ligands may be preferred to increase intracellular retention as they can no longer be exported out of the cell. In other embodiments, non polyglutamylatable ligands may be preferred to decrease intracellular retention.

[0406] In some embodiments, ligands of the present invention may include dihydrofolic acid or any of its derivatives that may bind to human DHFR. In some embodiments, the ligands of the present invention, may be 2,4, diaminohetrocyclic compounds. In some embodiments, the 4-oxo group in dihydrofolate may be modified to generate DHFR inhibitors. In one example, the 4-oxo group may be replaced by 4-amino group. Various diamino heterocycles, including pteridines, quinazolines, pyridopyrimidines, pyrimidines, and triazines, may also be used as scaffolds to develop DHFR inhibitors and may be used in the present invention. The crystal structure of DHFR in complex with known DHFR inhibitors may be utilized in the rational design of improved DHFR ligands. The ligands used herein include a 2,4-diaminopyrimidine ring with a propargyl group linked to an optionally substituted aryl or heteroaryl ring (as described in U.S. Pat. No. 8,426,432; the contents of which are incorporated herein by reference in their entirety).

[0407] In one embodiment, the ligands of the present invention may be FDA approved ligands capable of binding to the specific DDs or target regions within the DDs. In other embodiments, FDA approved ligands may be used to screen potential binders in the human protein. DDs may be designed based on the positive hits from the screen using the portion of the protein that binds to the ligand. In one embodiment, proteins that bind to FDA approved ligands as off target interactions may be used to design DDs of the present invention.

[0408] In some embodiments, ligands include TMP-derived ligands containing portions of the ligand known to mediate binding to DHFR. Ligands may also be modified to reduce off-target binding to other folate metabolism enzymes and increase specific binding to DHFR.

[0409] DHFR inhibitors cover a broad pharmacokinetic space with respect to the approved dose and their duration of action and are described in Table 8. In Table 8, PO stands for per os (i.e. by mouth); QD represents quaque die (i.e. every day); IV represents intravenous; TID represents ter un die (i.e. three times a day); and Cmax represents the peak serum concentration that a drug achieves after its administration.

TABLE 8
Pharmacokinetics of DHFR inhibitors

| | | | | | Duration | |
|---|---|---|---|---|---|---|
| Drug | Approved Dose | | Cmax | | of action | |
| Trimethoprim | PO: Up to 20 | mg/kg/day | PO: 1 | μM | 2-72 | hours |
| | IV: 20 | mg/kg/ | IV: 25 | μM | | |
| | 6 | hr | | | | |
| Methotrexate | PO: 30 | mg QD | 1.5 | μM | >12 | hours |
| | IV infusion: | | (12 | g/m² ) | | |
| | up to 5 | g/m²/4 hr | | infusion | | |

[0410] In some embodiments, the ligand selection is determined by the magnitude and duration of expression of the effector modules of the invention using the PK parameters described in Table 8. In some embodiments, high levels of expression of the payload for a short duration of time may be desired. In some embodiments, high levels of expression of the payload may be desired for a long duration. In some embodiments, low levels of expression of the payload may be desired for a long duration of time. In some embodiments, low levels of expression for a short duration of time may be desired. In such instances, TMP may be used as the ligand.

[0411] Ligands may also be selected from the analysis of the dependence of a known DHFR ligand on its molecular/chemical structure, through Structure Activity Relationships (SAR) study. Any of the methods related to SAR, known in art may be utilized to identify stabilizing ligands of the invention. SAR may be utilized to improve properties of the ligand such as specificity, potency, pharmacokinetics, bioavailability, and safety. SAR analysis of known DHFR inhibitors may also be combined with computational strategies and the high resolution X-ray structures of DHFR complexed with ligands may be used to develop compounds that can fit these criteria.

[0412] Methotrexate is converted to its polyglutamate form, which is required for the intracellular retention, and represents the most preferred substrate for most folate-dependent enzymes. Analysis of the structure of MTX with human and bacterial DHFR has revealed that the active site of hDHFR is larger than ecDHFR which provides a specific interaction with hDHFR. Human DHFR has a much larger active site for TMP as compared to ecDHFR; thus, hDHFR binds to TMP in a different conformation with fewer hydrogen bonds and is thus a poorer fit for the small inhibitor. In some embodiments, the ligands of the invention are designed to be lipophilic to improve cell permeability.

### Payloads

[0413] According to the present invention, payloads can be any natural protein in an organism genome, a fusion polypeptide, an antibody, or variants, mutants and derivatives thereof.

[0414] In some embodiments, payloads of the present invention may be immunotherapeutic agents that induce immune responses in an organism. The immunotherapeutic agent may be, but is not limited to, an antibody and fragments and variants thereof, a chimeric antigen receptor (CAR), a chimeric switch receptor, a cytokine, chemokine, a cytokine receptor, a chemokine receptor, a cytokine-cytokine receptor fusion polypeptide, or any agent that induces an immune response. In one embodiment, the immunotherapeutic agent induces an anti-cancer immune response in a cell, or in a subject.

[0415] In some embodiments, payloads of the present invention may be immunotherapeutic agents that induce immune responses in an organism. The immunotherapeutic agent may be a cytokine, a cytokine receptor, a cytokine-cytokine receptor fusion polypeptide or any agent that induces an immune response. In one embodiment, the immunotherapeutic agent induces an anti-cancer immune response in a cell, or in a subject.

### 1. Protein of Interest

[0416] In some embodiments, payloads of the invention may be a natural protein in an organism genome, or variants, mutants, derivatives thereof. The natural protein may be from, for example, a mammalian organism, a bacterium, and a virus.

[0417] In one example, the payload may be a protein of interest, or a polypeptide from human genome.

[0418] In some embodiments, the payload of the present invention may be cardiac lineage specification factors such as eomesodermin (EOMES), a T-box transcription factor; WNT signaling pathway components such as WNT3 and WNT 3A. EOMES is crucially required for the development of the heart. Cardiomyocyte programming by EOMES involves autocrine activation of the canonical WNT signaling pathway and vice versa. Under conditions that are conducive to promoting cardiac lineage, WNT signaling activates EOMES and EOMES in turn promotes WNT signaling creating a self-sustaining loop that promotes the cardiac lineage. An activation loop that is too weak or too strong promotes non-cardiac fates such as endodermal and other mesodermal fates respectively. The DDs of the present invention may be used to tune EOMES and WNT payload levels to generate an activation loop that initiate and/or sustain cardiac specification during gastrulation.

### 2. Antibodies, Antibody Fragments and Variants

[0419] In some embodiments, antibodies, fragments and variants thereof are payloads of the present invention.

[0420] Antibodies useful in this method include without limitation, any of those taught in copending commonly owned U.S. Provisional Patent Application No. 62/320,864 filed on Apr. 11, 2016 or in U.S. Provisional Application No. 62/466,596 filed Mar. 3, 2017 and the International Publication WO2017/180587, the contents of each of which are incorporated herein by reference in their entirety.

[0421] In some embodiments, antibodies of the present invention, include without limitation, any of those taught in Table 5 of copending commonly owned U.S. Provisional Patent Application No. 62/320,864 filed on Apr. 11, 2016, or in U.S. Provisional Application No. 62/466,596 filed Mar. 3, 2017 and the International Publication WO2017/180587, the contents of each of which are incorporated herein by reference in their entirety.

[0422] The antibody may be an intact antibody, an antibody light chain, antibody heavy chain, an antibody fragment, an antibody variant, or an antibody derivative.

[0423] For the purposes herein, an “antibody” may comprise a heavy and light variable domain as well as an Fc region.

[0424] As used herein, the term “native antibody” refers to a usually heterotetrameric glycoprotein of about 150,000 daltons, composed of two identical light (L) chains and two identical heavy (H) chains. Genes encoding antibody heavy and light chains are known and segments making up each have been well characterized and described (Matsuda et al., The Journal of Experimental Medicine. 1998, 188(11): 2151-62 and Li et al., Blood, 2004, 103(12): 4602-4609; the content of each of which are herein incorporated by reference in their entirety). Each light chain is linked to a heavy chain by one covalent disulfide bond, while the number of disulfide linkages varies among the heavy chains of different immunoglobulin isotypes. Each heavy and light chain also has regularly spaced intrachain disulfide bridges. Each heavy chain has at one end a variable domain (VH) followed by a number of constant domains. Each light chain has a variable domain at one end (VL) and a constant domain at its other end; the constant domain of the light chain is aligned with the first constant domain of the heavy chain, and the light chain variable domain is aligned with the variable domain of the heavy chain.

[0425] As used herein, the term “variable domain” refers to specific antibody domains found on both the antibody heavy and light chains that differ extensively in sequence among antibodies and are used in the binding and specificity of each particular antibody for its particular antigen. Variable domains comprise hypervariable regions. As used herein, the term “hypervariable region” refers to a region within a variable domain comprising amino acid residues responsible for antigen binding. The amino acids present within the hypervariable regions determine the structure of the complementarity determining regions (CDRs) that become part of the antigen-binding site of the antibody. As used herein, the term “CDR” refers to a region of an antibody comprising a structure that is complimentary to its target antigen or epitope. Other portions of the variable domain, not interacting with the antigen, are referred to as framework (FW) regions. The antigen-binding site (also known as the antigen combining site or paratope) comprises the amino acid residues necessary to interact with a particular antigen. The exact residues making up the antigen-binding site are typically elucidated by co-crystallography with bound antigen, however computational assessments can also be used based on comparisons with other antibodies (Strohl, W. R. Therapeutic Antibody Engineering. Woodhead Publishing, Philadelphia PA. 2012. Ch. 3, p 47-54, the contents of which are herein incorporated by reference in their entirety). Determining residues making up CDRs may include the use of numbering schemes including, but not limited to, those taught by Kabat (Wu et al., JEM, 1970, 132(2):211-250 and Johnson et al., Nucleic Acids Res. 2000, 28(1): 214-218, the contents of each of which are herein incorporated by reference in their entirety), Chothia (Chothia and Lesk, J. Mol. Biol. 1987, 196, 901, Chothia et al., Nature, 1989, 342, 877, and Al-Lazikani et al., J. Mol. Biol. 1997, 273(4): 927-948, the contents of each of which are herein incorporated by reference in their entirety), Lefranc (Lefranc et al., Immunome Res. 2005, 1:3) and Honegger (Honegger and Pluckthun, J. Mol. Biol. 2001, 309(3): 657-70, the contents of which are herein incorporated by reference in their entirety).

[0426] VH and VL domains have three CDRs each. VL CDRs are referred to herein as CDR-L1, CDR-L2 and CDR-L3, in order of occurrence when moving from N- to C-terminus along the variable domain polypeptide. VH CDRs are referred to herein as CDR-H1, CDR-H2 and CDR-H3, in order of occurrence when moving from N- to C-terminus along the variable domain polypeptide. Each of CDRs have favored canonical structures with the exception of the CDR-H3, which comprises amino acid sequences that may be highly variable in sequence and length between antibodies resulting in a variety of three-dimensional structures in antigen-binding domains (Nikoloudis, et al., Peer J. 2014, 2: e456). In some cases, CDR-H3s may be analyzed among a panel of related antibodies to assess antibody diversity. Various methods of determining CDR sequences are known in the art and may be applied to known antibody sequences (Strohl, W. R. Therapeutic Antibody Engineering. Woodhead Publishing, Philadelphia PA. 2012. Ch. 3, p 47-54, the contents of which are herein incorporated by reference in their entirety).

[0427] As used herein, the term “light chain” refers to a component of an antibody from any vertebrate species assigned to one of two clearly distinct types, called kappa and lambda based on amino acid sequences of constant domains. Depending on the amino acid sequence of the constant domain of their heavy chains, antibodies can be assigned to different classes. There are five major classes of intact antibodies: IgA, IgD, IgE, IgG, and IgM, and several of these may be further divided into subclasses (isotypes), e.g., IgG1, IgG2, IgG3, IgG4, IgA, and IgA2.

[0428] In some embodiments, the payload maybe a monoclonal antibody. As used herein, the term “monoclonal antibody” refers to an antibody obtained from a population of substantially homogeneous cells (or clones), i.e., the individual antibodies comprising the population are identical and/or bind the same epitope, except for possible variants that may arise during production of the monoclonal antibodies, such variants generally being present in minor amounts. In contrast to polyclonal antibody preparations that typically include different antibodies directed against different determinants (epitopes), each monoclonal antibody is directed against a single determinant on the antigen.

[0429] The modifier “monoclonal” indicates the character of the antibody as being obtained from a substantially homogeneous population of antibodies, and is not to be construed as requiring production of the antibody by any particular method. The monoclonal antibodies herein include “chimeric” antibodies (immunoglobulins) in which a portion of the heavy and/or light chain is identical with or homologous to corresponding sequences in antibodies derived from a particular species or belonging to a particular antibody class or subclass, while the remainder of the chain(s) is identical with or homologous to corresponding sequences in antibodies derived from another species or belonging to another antibody class or subclass, as well as fragments of such antibodies.

[0430] In one embodiment, the payload of the present invention may be a humanized antibody. As used herein, the term “humanized antibody” refers to a chimeric antibody comprising a minimal portion from one or more non-human (e.g., murine) antibody source(s) with the remainder derived from one or more human immunoglobulin sources. For the most part, humanized antibodies are human immunoglobulins (recipient antibody) in which residues from the hypervariable region from an antibody of the recipient are replaced by residues from the hypervariable region from an antibody of a non-human species (donor antibody) such as mouse, rat, rabbit or nonhuman primate having the desired specificity, affinity, and/or capacity. In one embodiment, the antibody may be a humanized full-length antibody. As a non-limiting example, the antibody may have been humanized using the methods taught in US Patent Publication NO. US20130303399, the contents of which are herein incorporated by reference in its entirety.

[0431] In one embodiment, the antibody may comprise a modified Fc region. As a non-limiting example, the modified Fc region may be made by the methods or may be any of the regions described in US Patent Publication NO. US20150065690, the contents of which are herein incorporated by reference in its entirety.

[0432] As used herein, the term “antibody variant” refers to a modified antibody (in relation to a native or starting antibody) or a biomolecule resembling a native or starting antibody in structure and/or function (e.g., an antibody mimetic). Antibody variants may be altered in their amino acid sequence, composition or structure as compared to a native antibody. Antibody variants may include, but are not limited to, antibodies with altered isotypes (e.g., IgA, IgD, IgE, IgG1, IgG2, IgG3, IgG4, or IgM), humanized variants, optimized variants, multispecific antibody variants (e.g., bispecific variants), and antibody fragments.

### Antibody Fragments and Variants

[0433] In some embodiments, antibody fragments and variants may comprise antigen binding regions from intact antibodies. Examples of antibody fragments and variants may include, but are not limited to Fab, Fab′, F(ab′)2, and Fv fragments; diabodies; linear antibodies; single-chain antibody molecules such as single chain variable fragment (scFv); and multispecific antibodies formed from antibody fragments. Papain digestion of antibodies produces two identical antigen-binding fragments, called “Fab” fragments, each with a single antigen-binding site. Also produced is a residual “Fc” fragment, whose name reflects its ability to crystallize readily. Pepsin treatment yields an F(ab′)2 fragment that has two antigen-binding sites and is still capable of cross-linking with the antigen. Pharmaceutical compositions, biocircuits, biocircuit components, effector modules including their SREs or payloads of the present invention may comprise one or more of these fragments.

[0434] In some embodiments, antibody fragments and variants may comprise antigen binding regions from intact antibodies. Examples of antibody fragments and variants may include, but are not limited to Fab, Fab′, F(ab′)2, and Fv fragments; diabodies; linear antibodies; single-chain antibody molecules such as single chain variable fragment (scFv); dimeric single-chain variable fragment (di-scFv), single domain antibody (sdAb) and multispecific antibodies formed from antibody fragments. Papain digestion of antibodies produces two identical antigen-binding fragments, called “Fab” fragments, each with a single antigen-binding site. Also produced is a residual “Fc” fragment, whose name reflects its ability to crystallize readily. Pepsin treatment yields an F(ab′)2 fragment that has two antigen-binding sites and is still capable of cross-linking antigen. Pharmaceutical compositions, biocircuits, biocircuit components, effector modules including their SREs or payloads of the present invention may comprise one or more of these fragments.

[0435] As used herein, the term “Fv” refers to an antibody fragment comprising the minimum fragment on an antibody needed to form a complete antigen-binding site. These regions consist of a dimer of one heavy chain and one light chain variable domain in tight, non-covalent association. Fv fragments can be generated by proteolytic cleavage, but are largely unstable. Recombinant methods are known in the art for generating stable Fv fragments, typically through insertion of a flexible linker between the light chain variable domain and the heavy chain variable domain (to form a single chain Fv (scFv) or through the introduction of a disulfide bridge between heavy and light chain variable domains (Strohl, W. R. Therapeutic Antibody Engineering. Woodhead Publishing, Philadelphia PA. 2012. Ch. 3, p 46-47, the contents of which are herein incorporated by reference in their entirety).

[0436] As used herein, the term “single chain Fv” or “scFv” refers to a fusion protein of VH and VL antibody domains, wherein these domains are linked together into a single polypeptide chain by a flexible peptide linker. In some embodiments, the Fv polypeptide linker enables the scFv to form the desired structure for antigen binding. In some embodiments, scFvs are utilized in conjunction with phage display, yeast display or other display methods where they may be expressed in association with a surface member (e.g. phage coat protein) and used in the identification of high affinity peptides for a given antigen.

[0437] Using molecular genetics, two scFvs can be engineered in tandem into a single polypeptide, separated by a linker domain, called a “tandem scFv” (tascFv). Construction of a tascFv with genes for two different scFvs yields a “bispecific single-chain variable fragments” (bis-scFvs). Only two tascFvs have been developed clinically by commercial firms; both are bispecific agents in active early phase development by Micromet for oncologic indications, and are described as “Bispecific T-cell Engagers (BiTE).” Blinatumomab is an anti-CD19/anti-CD3 bispecific tascFv that potentiates T-cell responses to B-cell non-Hodgkin lymphoma in Phase 2. MT 110 is an anti-EP-CAM/anti-CD3 bispecific tascFv that potentiates T-cell responses to solid tumors in Phase 1. Bispecific, tetravalent “TandAbs” are also being researched by Affimed (Nelson, A. L., MAbs., 2010, January-February; 2(1):77-83). maxibodies (bivalent scFv fused to the amino terminus of the Fc (CH2-CH3 domains) of IgG may also be included.

[0438] As used herein, the term “bispecific antibody” refers to an antibody capable of binding two different antigens. Such antibodies typically comprise regions from at least two different antibodies. Bispecific antibodies may include any of those described in Riethmuller, G. Cancer Immunity. 2012, 12:12-18, Marvin et al., 2005. Acta Pharmacologica Sinica. 2005, 26(6): 649-658 and Schaefer et al., PNAS. 2011, 108(27):11187-11192, the contents of each of which are herein incorporated by reference in their entirety. In some aspects, bispecific antibodies may be trifunctional antibodies (3funct) and BiTE (bi-specific T cell engager).

[0439] As used herein, the term “diabody” refers to a small antibody fragment with two antigen-binding sites. Diabodies are functional bispecific single-chain antibodies (bscAb). Diabodies comprise a heavy chain variable domain VH connected to a light chain variable domain VL in the same polypeptide chain. By using a linker that is too short to allow pairing between the two domains on the same chain, the domains are forced to pair with the complementary domains of another chain and create two antigen-binding sites. Diabodies are described more fully in, for example, EP 404,097; WO 93/11161; and Hollinger et al. (Hollinger, P. et al., “Diabodies”: Small bivalent and bispecific antibody fragments. PNAS, 1993. 90: 6444-6448); the contents of each of which are incorporated herein by reference in their entirety.

[0440] The term “intrabody” refers to a form of antibody that is not secreted from a cell in which it is produced, but instead targets one or more intracellular proteins. Intrabodies may be used to affect a multitude of cellular processes including, but not limited to intracellular trafficking, transcription, translation, metabolic processes, proliferative signaling and cell division. In some embodiments, methods of the present invention may include intrabody-based therapies. In some such embodiments, variable domain sequences and/or CDR sequences disclosed herein may be incorporated into one or more constructs for intrabody-based therapy.

[0441] In some embodiments, antibody variants may be antibody mimetics. As used herein, the term “antibody mimetic” refers to any molecule which mimics the function or effect of an antibody and which binds specifically and with high affinity to their molecular targets. In some embodiments, antibody mimetics may be monobodies, designed to incorporate the fibronectin type III domain (Fn3) as a protein scaffold (U.S. Pat. Nos. 6,673,901; 6,348,584). In some embodiments, antibody mimetics may be those known in the art including, but are not limited to affibody molecules, affilins, affitins, anticalins, avimers, Centyrins, DARPINS™, Fynomers and Kunitz and domain peptides. In other embodiments, antibody mimetics may include one or more non-peptide regions.

[0442] In some embodiments, antibody variants may be multispecific antibodies that bind more than one epitope. As used herein, the terms “multibody” or “multispecific antibody” refer to an antibody wherein two or more variable regions bind to different epitopes. The epitopes may be on the same or different targets. In one embodiment, the multispecific antibody may be generated and optimized by the methods described in International Patent Publication NO. WO2011109726 and US Patent Publication NO. US20150252119, the contents of which each of which are herein incorporated by reference in their entirety. These antibodies are able to bind to multiple antigens with high specificity and high affinity.

[0443] In certain embodiments, a multi-specific antibody is a “bispecific antibody” which recognizes two different epitopes on the same or different antigens. In one aspect, bispecific antibodies are capable of binding two different antigens. Such antibodies typically comprise antigen-binding regions from at least two different antibodies. For example, a bispecific monoclonal antibody (BsMAb, BsAb) is an artificial protein composed of fragments of two different monoclonal antibodies, thus allowing the BsAb to bind to two different types of antigen. Bispecific antibody frameworks may include any of those described in Riethmuller, G., 2012. Cancer Immunity, 2012, 12:12-18; Marvin et al., Acta Pharmacologica Sinica. 2005, 26(6):649-658; and Schaefer et al., PNAS. 2011, 108(27): 11187-11192, the contents of each of which are herein incorporated by reference in their entirety. New generations of BsMAb, called “trifunctional bispecific” antibodies, have been developed. These consist of two heavy and two light chains, one each from two different antibodies, where the two Fab regions (the arms) are directed against two antigens, and the Fc region (the foot) comprises the two heavy chains and forms the third binding site.

[0444] In certain embodiments, antibody variants may be antibodies comprising a single antigen-binding domain. These molecules are extremely small, with molecular weights approximately one-tenth of those observed for full-sized mAbs. Further antibodies may include “nanobodies” derived from the antigen-binding variable heavy chain regions (VHHs) of heavy chain antibodies found in camels and llamas, which lack light chains (Nelson, A. L., MAbs. 2010. January-February; 2(1):77-83).

[0445] In some embodiments, the antibody may be “miniaturized”. Among the best examples of mAb miniaturization are the small modular immunopharmaceuticals (SMIPs) from Trubion Pharmaceuticals. These molecules, which can be monovalent or bivalent, are recombinant single-chain molecules containing one VL, one VH antigen-binding domain, and one or two constant “effector” domains, all connected by linker domains. Presumably, such a molecule might offer the advantages of increased tissue or tumor penetration claimed by fragments while retaining the immune effector functions conferred by constant domains. At least three “miniaturized” SMIPs have entered clinical development. TRU-015, an anti-CD20 SMIP developed in collaboration with Wyeth, is the most advanced project, having progressed to Phase 2 for rheumatoid arthritis (RA). Earlier attempts in systemic lupus erythrematosus (SLE) and B cell lymphomas were ultimately discontinued. Trubion and Facet Biotechnology are collaborating in the development of TRU-016, an anti-CD37 SMIP, for the treatment of CLL and other lymphoid neoplasias, a project that has reached Phase 2. Wyeth has licensed the anti-CD20 SMIP SBI-087 for the treatment of autoimmune diseases, including RA, SLE and possibly multiple sclerosis, although these projects remain in the earliest stages of clinical testing. (Nelson, A. L., MAbs, 2010. January-Februray; 2(1):77-83).

[0446] One example of miniaturized antibodies is called “unibody” in which the hinge region has been removed from IgG4 molecules. While IgG4 molecules are unstable and can exchange light-heavy chain heterodimers with one another, deletion of the hinge region prevents heavy chain-heavy chain pairing entirely, leaving highly specific monovalent light/heavy heterodimers, while retaining the Fc region to ensure stability and half-life in vivo. This configuration may minimize the risk of immune activation or oncogenic growth, as IgG4 interacts poorly with FcRs and monovalent unibodies fail to promote intracellular signaling complex formation (see, e.g., Nelson, A. L., MAbs, 2010. January-Februray; 2(1):77-83).

[0447] In some embodiments, antibody variants may include single-domain antibodies (sdAbs, or nanobodies) which are antibody fragment consisting of a single monomeric variable antibody domain. Like a whole antibody, it is able to bind selectively to a specific antigen. In one aspect, a sdAb may be a “Camel Ig or “camelid VHH”. As used herein, the term “camel Ig” refers to the smallest known antigen-binding unit of a heavy chain antibody (Koch-No lte, et al, FASEB J., 2007, 21: 3490-3498). A “heavy chain antibody” or a “camelid antibody” refers to an antibody that contains two VH domains and no light chains (Riechmann L. et al, J. Immunol. Methods, 1999, 231: 25-38; International patent publication NOs. WO1994/04678 and WO1994/025591; and U.S. Pat. No. 6,005,079). In another aspect, an sdAb may be a “immunoglobulin new antigen receptor” (IgNAR). As used herein, the term “immunoglobulin new antigen receptor” refers to class of antibodies from the shark immune repertoire that consist of homodimers of one variable new antigen receptor (VNAR) domain and five constant new antigen receptor (CNAR) domains. IgNARs represent some of the smallest known immunoglobulin-based protein scaffolds and are highly stable and possess efficient binding characteristics. The inherent stability can be attributed to both (i) the underlying Ig scaffold, which presents a considerable number of charged and hydrophilic surface exposed residues compared to the conventional antibody VH and VL domains found in murine antibodies; and (ii) stabilizing structural features in the complementary determining region (CDR) loops including inter-loop disulphide bridges, and patterns of intra-loop hydrogen bonds.

[0448] In some embodiments, antibody variants may include intrabodies. Intrabodies are a form of antibody that is not secreted from a cell in which it is produced, but instead targets one or more intracellular proteins. Intrabodies are expressed and function intracellularly, and may be used to affect a multitude of cellular processes including, but not limited to intracellular trafficking, transcription, translation, metabolic processes, proliferative signaling and cell division. In some embodiments, methods described herein include intrabody-based therapies. In some such embodiments, variable domain sequences and/or CDR sequences disclosed herein are incorporated into one or more constructs for intrabody-based therapy. For example, intrabodies may target one or more glycated intracellular proteins or may modulate the interaction between one or more glycated intracellular proteins and an alternative protein.

[0449] The intracellular expression of intrabodies in different compartments of mammalian cells allows blocking or modulation of the function of endogenous molecules (Biocca, et al., EMBO J. 1990, 9: 101-108; Colby et al., Proc. Natl. Acad. Sci. U.S.A. 2004, 101: 17616-17621). Intrabodies can alter protein folding, protein-protein, protein-DNA, protein-RNA interactions and protein modification. They can induce a phenotypic knockout and work as neutralizing agents by direct binding to the target antigen, by diverting its intracellular trafficking or by inhibiting its association with binding partners. With high specificity and affinity to target antigens, intrabodies have advantages to block certain binding interactions of a particular target molecule, while sparing others.

[0450] Sequences from donor antibodies may be used to develop intrabodies. Intrabodies are often recombinantly expressed as single domain fragments such as isolated VH and VL domains or as a single chain variable fragment (scFv) antibody within the cell. For example, intrabodies are often expressed as a single polypeptide to form a single chain antibody comprising the variable domains of the heavy and light chains joined by a flexible linker polypeptide. Intrabodies typically lack disulfide bonds and are capable of modulating the expression or activity of target genes through their specific binding activity. Single chain intrabodies are often expressed from a recombinant nucleic acid molecule and engineered to be retained intracellularly (e.g., retained in the cytoplasm, endoplasmic reticulum, or periplasm). Intrabodies may be produced using methods known in the art, such as those disclosed and reviewed in: (Marasco et al., PNAS, 1993, 90: 7889-7893; Chen et al., Hum. Gene Ther. 1994, 5:595-601; Chen et al., 1994, PNAS, 91: 5932-5936; Maciejewski et al., 1995, Nature Med., 1: 667-673; Marasco, 1995, Immunotech, 1: 1-19; Mhashilkar, et al., 1995, EMBO J. 14: 1542-51; Chen et al., 1996, Hum. Gene Therap., 7: 1515-1525; Marasco, Gene Ther. 4:11-15, 1997; Rondon and Marasco, 1997, Annu. Rev. Microbiol. 51:257-283; Cohen, et al., 1998, Oncogene 17:2445-56; Proba et al., 1998, J. Mol. Biol. 275:245-253; Cohen et al., 1998, Oncogene 17:2445-2456; Hassanzadeh, et al., 1998, FEBS Lett. 437:81-6; Richardson et al., 1998, Gene Ther. 5:635-44; Ohage and Steipe, 1999, J. Mol. Biol. 291:1119-1128; Ohage et al., 1999, J. Mol. Biol. 291:1129-1134; Wirtz and Steipe, 1999, Protein Sci. 8:2245-2250; Zhu et al., 1999, J. Immunol. Methods 231:207-222; Arafat et al., 2000, Cancer Gene Ther. 7:1250-6; der Maur et al., 2002, J. Biol. Chem. 277:45075-85; Mhashilkar et al., 2002, Gene Ther. 9:307-19; and Wheeler et al., 2003, FASEB J. 17: 1733-5; and references cited therein).

[0451] In certain embodiments, antibody variants may include biosynthetic antibodies as described in U.S. Pat. No. 5,091,513, the contents of which are herein incorporated by reference in their entirety. Such antibody may include one or more sequences of amino acids constituting a region which behaves as a biosynthetic antibody binding site (BABS). The sites comprise 1) non-covalently associated or disulfide bonded synthetic VH and VL dimers, 2) VH-VL or VL-VH single chains wherein the VH and VL are attached by a polypeptide linker, or 3) individuals VH or VL domains. The binding domains comprise linked CDR and FR regions, which may be derived from separate immunoglobulins. The biosynthetic antibodies may also include other polypeptide sequences which function, e.g., as an enzyme, toxin, binding site, or site of attachment to an immobilization media or radioactive atom. Methods are disclosed for producing the biosynthetic antibodies, for designing BABS having any specificity that can be elicited by in vivo generation of antibody, and for producing analogs thereof.

[0452] In some embodiments, antibody variants may include antibodies with antibody acceptor frameworks taught in U.S. Pat. No. 8,399,625. Such antibody acceptor frameworks may be particularly well suited accepting CDRs from an antibody of interest.

[0453] In one embodiment, the antibody may be a conditionally active biologic protein. An antibody may be used to generate a conditionally active biologic protein which are reversibly or irreversibly inactivated at the wild type normal physiological conditions as well as to such conditionally active biologic proteins and uses of such conditional active biologic proteins are provided. Such methods and conditionally active proteins are taught in, for example, International Publication Nos. WO2015175375 and WO2016036916 and US Patent Publication No. US20140378660, the contents of each of which are incorporated herein by reference in their entirety.

[0454] The preparation of antibodies, whether monoclonal or polyclonal, is known in the art. Techniques for the production of antibodies are well known in the art and described, e.g. in Harlow and Lane “Antibodies, A Laboratory Manual”, Cold Spring Harbor Laboratory Press, 1988; Harlow and Lane “Using Antibodies: A Laboratory Manual” Cold Spring Harbor Laboratory Press, 1999 and “Therapeutic Antibody Engineering: Current and Future Advances Driving the Strongest Growth Area in the Pharmaceutical Industry” Woodhead Publishing, 2012.

[0455] The antibodies and fragments and variants thereof as described herein can be produced using recombinant polynucleotides. In one embodiment, the polynucleotides have a modular design to encode at least one of the antibodies, fragments or variants thereof. As a non-limiting example, the polynucleotide construct may encode any of the following designs: (1) the heavy chain of an antibody, (2) the light chain of an antibody, (3) the heavy and light chain of the antibody, (4) the heavy chain and light chain separated by a linker, (5) the VH1, CH1, CH2, CH3 domains, a linker and the light chain or (6) the VH1, CH1, CH2, CH3 domains, VL region, and the light chain. Any of these designs may also comprise optional linkers between any domain and region. The polynucleotides of the present invention may be engineered to produce any standard class of immunoglobulins using an antibody described herein or any of its component parts as a starting molecule.

[0456] In some embodiments, antibody payloads of the present invention may be therapeutic antibodies. As non-limiting examples, antibodies and fragments and variants thereof may be specific to tumor associated antigens, or tumor specific antigens, or pathogen antigens. In some aspects, antibodies may be blocking antibodies (also referred to as antagonistic antibodies), for example, blocking antibodies against PD-1, PD-L1, PD-L2, CTLA-4 and other inhibitory molecules. In other aspects, antibodies may be agonist antibodies such as agonistic antibodies specific to stimulatory molecules, e g., 4-1BB (CD137), OX40 (CD134), CD40, GITR and CD27.

[0457] Other exemplary therapeutic antibodies may include, but are not limited to, Abagovomab, Abcxmab, Abituzumab, Abrilumab, Actoxumab, Adalimumab, Adecatumumab, Afasevikumab, Afelimomab, Afutuzumab, Alacizumab, Alemtuzumab, Alirocumab, Altumomab, Amatuximab, Anetumab, Anifrolumab, Apolizumab, Arcitumomab, Ascrinvacumab, Aselizumab, Atezolizumab, Atinumab, Atlizumab, Atorolimumab, Avelumab, Bapineuzumab, Basiliximab, Bavituximab, Bectumomab, Begelomab, Belimumab, Benralizumab, Bertilimumab, Besilesomab, Bevacizumab, Bezlotoxumab, Biciromab, Bimagrumab, Bimekizumab, Bivatuzumab, Bleselumab, Blinatumomab, Blinatumomab, Blosozumab, Bococizumab, Brentuximab, Briaknumab, Brodalumab, Brolucizumab, Brontictuzumab, Cabiralizumab, Canakinumab, Cantuzumab, Caplacizumab, Capromab, Carlumab, Carotuximab, Catumaxomab, cBR96-doxorubicin immunoconjugate, Cedelizumab, Cergutuzumab, Certolizumab pegol, Cetuximab, Citatuzumab, Cixutumumab, Clazakizumab, Clenoliximab, Clivatuzumab, Codrituzumab, Coltuximab, Contatumumab, Concizumab, Crenezumab, Crotedumab, CR6261, Dacetumab, Daclizumab, Dalotuzumab, Dapirolizumab pegol, Daratumumab, Dectrekumab, Demcizumab, Denintuzumab, Denosumab, Derlotuximab biotin, Detumomab, Dinutuximab, Diridavumab, Domagrozumab, Dorlimomab aritox, Drozitumab, Duligotumab, Dupilumab, Durvalumab, Dusigitumab, Ecromeximab, Eculizumab, Edobacomab, Edrecolomab, Efalizumab, Efungumab, Eldelumab, Elgemtumab, Elotuzumab, Elsilimomab, Emactuzumab, Emibetuzumab, Emicizumab, Enavatuzumab, Enfortumab vedotin, Enlimomab pegol, Enoblituzumab, Enokizumab, Enoticumab, Ensituximab, Epitumomab cituxetan, Epratuzumab, Erlizumab, Ertumaxomab, Etaracizumab, Etrolizumab, Evinacumab, Evolocumab, Exbivirumab, Fanolesomab, Faralimomab, Farletuzumab, Fasinumab, FBTA05, Felvizumab, Fezakinumab, Fibatuzumab, Ficlatuzumab, Figitumumab, Firivumab, Flanvotumab, Fletikumab, Fontolizumab, Foralumab, Foravirumab, Fresolimumab, Fulranumab, Futuximab, Galcanezumab, Galiximab, Ganitumab, Gantenerumab, Gavilimomab, Gemtuzumab ozogamicin, Gevokizumab, Girentuximab, Glembatumumab vedotin, Golimumab, Gomiliximab, Guselkumab, Ibalizumab, Ibritumomab tituxetan, icrucumab, Idarucizumab, Igovomab, IMAB362, Imalumab, Imciromab, Imgatuzumab, Inclacumab, Indatuximab, Indusatumab, Inebilizumab, Infliximab, Intetumumab, Inolimomab, Inotuzumab, Ipilimumab, Iratumumab, Isatuximab, Itolizumab, Ixekizumab, Keliximab, Labetuzumab, Lambrolizumab, Lampalizumab, Lanadelumab, Landogrozumab, Laprituximab, Lebrikizumab, Lemalesomab, Lendalizumab, Lenzilumab, Lerdelimumab, Lexatumumab, Libivirumab, Lifastuzumab, Ligelizumab, Lilotomab, Lintuzumab, Lirilumab, Lodelcizumab, Lokivetmab, Lorvotuzumab, Lucatumumab, Lulizumab pegol, Lumiliximab, Lumretuzumab, Mapatumumab, Margetuximab, Maslimomab, Mavrilimumab, Matuzumab, Mepolizumab, Metelimumab, Milatuzumab, Minretumomab, Mirvetuximab, Mitumomab, Mogamulizumab, Monalizumab, Morolimumab, Motavizumab, Moxetumomab pasudotox, Muromonab-CD3, nacolomab tafenatox, Namilumab, naptumomab, naratuximab, Narnatumab, Natalizumab, Navicixizumab, Navivumab, Nebacumab, Necitumumab, Nemolizumab, Nerelimomab, Nesvacumab, Nimotuzumab, Nivolumab, Nofetumomab, Obiltoxaximab, Obinutuzumab, Ocaratuzumab, Ocrelizumab, Odulimomab, Ofatumumab, Olaratumab, Olaratumab, Olokizumab, Omalizumab, Onartuzumab, Ontuxizumab, Opicinumab, Oportuzumab monatox, Oregovomab, Orticumab, Otelixizumab, Otlertuzumab, Oxelumab, Ozanezumab, Ozoralizumab, Pagibaximab, Palivizumab, Pamrevlumab, Panitumumab, Pankomab, Panobacumab, Parsatuzumab, Pascolizumab, Pasotuxizumab, Pateclizumab, Patritumab, Pembrolizumab, Pemtumomab, Perakizumab, Pertuzumab, Pexelizumab, Pidilizumab, Pinatuzumab, Pintumomab, Placulumab, Plozalizumab, Pogalizumab, Polatuzumab, Ponezumab, Prezalizumab, Priliximab, Pritoxaximab, Pritumumab, PRO 140, Quilizumab, Racotumomab, Radretumab, Rafivirumab, Ralpancizumab, Ramucirumab, Ranibizumab, Raxibacumab, Refanezumab, Regavirumab, Reslizumab, Rilotumumab, Rinucumab, Risankizumab, Rituximab, Rivabazumab pegol, Robatumumab, Roledumab, Romosozumab, Rontalizumab, Rovalpituzumab, Rovelizumab, Ruplizumab, Sacituzumab, Samalizumab, Sapelizumab, Sarilumab, Satumomab pendetide, Secukinumab, Seribantumab, Setoxaximab, Sevirumab, Sibrotuzumab, SGN-CD19A, SGN-CD33A, Sifalimumab, Siltuximab, Simtuzumab, Siplizumab, Sirukumab, Sofituzumab vedotin, Solanezumab, Solitomab, Sonepcizumab, Sontuzumab, Stamulumab, Sulesomab, Suvizumab, tabalumab, Tacatuzumab, Tadocizumab, Talizumab, Tamtuvetmab, Tanezumab, Taplitumomab, Tarextumab, Tefibazumab, Telimomab aritox, Tenatumomab, Teneliximab, Teplizumab, Teprotumumab, Tesidolumab, Tetulomab, Tezepelumab, TGN1412, Ticilimumab, Tildrakizumab, Tigatuzumab, Timolumab, Tisotumab vedotin, TNX-650, Tocilizumab, Toralizumab, Tosatoxumab, Tositumomab, Tovetumab, Tralokinumab, Trastuzumab, TRBS07, Tregalizumab, Tremelimumab, Trevogrumab, Tucotuzumab, Tuvirumab, Ublituximab, Ulcocuplumab, Urelumab, Urtoxazumab, Ustekinumab, Vadastuximab talirine, Vandortuzumab vedotin, Vantictumab, Vanucizumab, Vapaliximab, Varlilumab, Vatelizumab, Vedolizumab, Veltuzumab, Vepalimomab, Vesencumab, Visilizumab, Vobarilizumab, Volociximab, Vorsetuzumab, Votumumab, Xentuzumab, Zalutumumab, Zanolimumab, Zatuximab, Ziralimumab and Zolimomab aritox.

Bicistronic and/or Pseudo-Bicistronic Antibody Payloads

[0458] According to the present invention, a bicistronic payload is a polynucleotide encoding a two-protein chain antibody on a single polynucleotide strand. A pseudo-bicistronic payload is a polynucleotide encoding a single chain antibody discontinuously on a single polynucleotide strand. For bicistronic payloads, the encoded two strands or two portions/regions and/or domains (as is the case with pseudo-bicistronic) are separated by at least one nucleotide not encoding the strands or domains. More often the separation comprises a cleavage signal or site or a non-coding region of nucleotides. Such cleavage sites include, for example, furin cleavage sites encoded as an “RKR” site, or a modified furin cleavage site in the resultant polypeptide or any of those taught herein.

[0459] According to the present invention, a single domain payload comprises one or two polynucleotides encoding a single monomeric variable antibody domain. Typically, single domain antibodies comprise one variable domain (VH) of a heavy-chain antibody.

[0460] According to the present invention, a single chain Fv payloads is a polynucleotide encoding at least two coding regions and a linker region. The scFv payload may encode a fusion protein of the variable regions of the heavy (VH) and light chains (VL) of immunoglobulins, connected with a short linker peptide of ten to about 25 amino acids. The linker is usually rich in glycine for flexibility, as well as serine or threonine for solubility, and can either connect the N-terminus of the VH with the C-terminus of the VL, or vice versa. Other linkers include those known in the art and disclosed herein.

[0461] According to the present invention, a bispecific payload is a polynucleotide encoding portions or regions of two different antibodies. Bispecific payloads encode polypeptides which may bind two different antigens. Polynucleotides of the present invention may also encode trispecific antibodies having an affinity for three antigens.

[0462] For the purposes herein, an “antibody” may comprise a heavy and light variable domain as well as an Fc region. As used herein, the term “native antibody” usually refers to a heterotetrameric glycoprotein of about 150,000 daltons, composed of two identical light (L) chains and two identical heavy (H) chains. Genes encoding antibody heavy and light chains are known and segments making up each have been well characterized and described (Matsuda et al., The Journal of Experimental Medicine. 1998, 188(11): 2151-62 and Li et al., Blood, 2004, 103(12): 4602-4609; the content of each of which are herein incorporated by reference in their entirety). Each light chain is linked to a heavy chain by one covalent disulfide bond, while the number of disulfide linkages varies among the heavy chains of different immunoglobulin isotypes. Each heavy and light chain also has regularly spaced intrachain disulfide bridges. Each heavy chain has at one end a variable domain (VH) followed by a number of constant domains. Each light chain has a variable domain at one end (VL) and a constant domain at its other end; the constant domain of the light chain is aligned with the first constant domain of the heavy chain, and the light chain variable domain is aligned with the variable domain of the heavy chain.

[0463] As used herein, the term “variable domain” refers to specific antibody domains found on both the antibody heavy and light chains that differ extensively in sequence among antibodies and are used in the binding and specificity of each particular antibody for its particular antigen. Variable domains comprise hypervariable regions. As used herein, the term “hypervariable region” refers to a region within a variable domain comprising amino acid residues responsible for antigen binding. The amino acids present within the hypervariable regions determine the structure of the complementarity determining regions (CDRs) that become part of the antigen-binding site of the antibody. As used herein, the term “CDR” refers to a region of an antibody comprising a structure that is complimentary to its target antigen or epitope. Other portions of the variable domain, not interacting with the antigen, are referred to as framework (FW) regions. The antigen-binding site (also known as the antigen combining site or paratope) comprises the amino acid residues necessary to interact with a particular antigen. The exact residues making up the antigen-binding site are typically elucidated by co-crystallography with bound antigen, however computational assessments based on comparisons with other antibodies can also be used (Strohl, W. R. Therapeutic Antibody Engineering. Woodhead Publishing, Philadelphia PA. 2012. Ch. 3, p 47-54, the contents of which are herein incorporated by reference in their entirety). Determining residues that make up CDRs may include the use of numbering schemes including, but not limited to, those taught by Kabat (Wu et al., JEM, 1970, 132(2):211-250 and Johnson et al., Nucleic Acids Res. 2000, 28(1): 214-218, the contents of each of which are herein incorporated by reference in their entirety), Chothia (Chothia and Lesk, J. Mol. Biol. 1987, 196, 901, Chothia et al., Nature, 1989, 342, 877, and Al-Lazikani et al., J. Mol. Biol. 1997, 273(4): 927-948, the contents of each of which are herein incorporated by reference in their entirety), Lefranc (c) and Honegger (Honegger and Pluckthun, J. Mol. Biol. 2001, 309(3): 657-70, the contents of which are herein incorporated by reference in their entirety).

[0464] VH and VL domains have three CDRs each. VL CDRs are referred to herein as CDR-L1, CDR-L2 and CDR-L3, in order of occurrence when moving from N- to C-terminus along the variable domain polypeptide. VH CDRs are referred to herein as CDR-H1, CDR-H2 and CDR-H3, in order of occurrence when moving from N- to C-terminus along the variable domain polypeptide. Each of CDRs has favored canonical structures with the exception of the CDR-H3, which comprises amino acid sequences that may be highly variable in sequence and length between antibodies resulting in a variety of three-dimensional structures in antigen-binding domains (Nikoloudis, et al., PeerJ. 2014, 2: e456). In some cases, CDR-H3s may be analyzed among a panel of related antibodies to assess antibody diversity. Various methods of determining CDR sequences are known in the art and may be applied to known antibody sequences (Strohl, W. R. Therapeutic Antibody Engineering. Woodhead Publishing, Philadelphia PA. 2012. Ch. 3, p 47-54, the contents of which are herein incorporated by reference in their entirety).

[0465] As used herein, the term “Fv” refers to an antibody fragment comprising the minimum fragment on an antibody needed to form a complete antigen-binding site. These regions consist of a dimer of one heavy chain and one light chain variable domain in tight, non-covalent association. Fv fragments can be generated by proteolytic cleavage, but are largely unstable. Recombinant methods are known in the art for generating stable Fv fragments, typically through insertion of a flexible linker between the light chain variable domain and the heavy chain variable domain (to form a single chain Fv (scFv)) or through the introduction of a disulfide bridge between heavy and light chain variable domains (Strohl, W. R. Therapeutic Antibody Engineering. Woodhead Publishing, Philadelphia PA. 2012. Ch. 3, p 46-47, the contents of which are herein incorporated by reference in their entirety).

[0466] As used herein, the term “light chain” refers to a component of an antibody from any vertebrate species assigned to one of two clearly distinct types, called kappa and lambda based on amino acid sequences of constant domains. Depending on the amino acid sequence of the constant domain of their heavy chains, antibodies can be assigned to different classes. There are five major classes of intact antibodies: IgA, IgD, IgE, IgG, and IgM, and several of these may be further divided into subclasses (isotypes), e.g., IgG1, IgG2, IgG3, IgG4, IgA, and IgA2.

[0467] As used herein, the term “single chain Fv” or “scFv” refers to a fusion protein of VH and VL antibody domains, wherein these domains are linked together into a single polypeptide chain by a flexible peptide linker. In some embodiments, the Fv polypeptide linker enables the scFv to form the desired structure for antigen binding. In some embodiments, scFvs are utilized in conjunction with phage display, yeast display or other display methods where they may be expressed in association with a surface member (e.g. phage coat protein) and used in the identification of high affinity peptides for a given antigen.

[0468] Using molecular genetics, two scFvs can be engineered in tandem into a single polypeptide, separated by a linker domain, called a “tandem scFv” (tascFv). Construction of a tascFv with genes for two different scFvs yields a “bispecific single-chain variable fragments” (bis-scFvs). Only two tascFvs have been developed clinically by commercial firms; both are bispecific agents in active early phase development by Micromet for oncologic indications, and are described as “Bispecific T-cell Engagers (BiTE).” Blinatumomab is an anti-CD19/anti-CD3 bispecific tascFv that potentiates T-cell responses to B-cell non-Hodgkin lymphoma in Phase 2. MT 110 is an anti-EP-CAM/anti-CD3 bispecific tascFv that potentiates T-cell responses to solid tumors in Phase 1. Bispecific, tetravalent “TandAbs” are also being researched by Affimed (Nelson, A. L., MAbs., 2010, January-Februray; 2(1):77-83). maxibodies (bivalent scFv fused to the amino terminus of the Fc (CH2-CH3 domains) of IgG may also be included.

[0469] As used herein, the term “bispecific antibody” refers to an antibody capable of binding two different antigens. Such antibodies typically comprise regions from at least two different antibodies. Bispecific antibodies may include any of those described in Riethmuller, G. Cancer Immunity. 2012, 12:12-18, Marvin et al., 2005. Acta Pharmacologica Sinica. 2005, 26(6): 649-658 and Schaefer et al., PNAS. 2011, 108(27):11187-11192, the contents of each of which are herein incorporated by reference in their entirety.

[0470] As used herein, the term “diabody” refers to a small antibody fragment with two antigen-binding sites. Diabodies are functional bispecific single-chain antibodies (bscAb). Diabodies comprise a heavy chain variable domain VH connected to a light chain variable domain VL in the same polypeptide chain. By using a linker that is too short to allow pairing between the two domains on the same chain, the domains are forced to pair with the complementary domains of another chain and create two antigen-binding sites. Diabodies are described more fully in, for example, EP 404,097; WO 93/11161; and Hollinger et al. (Hollinger, P. et al., “Diabodies”: Small bivalent and bispecific antibody fragments. PNAS, 1993. 90: 6444-6448); the contents of each of which are incorporated herein by reference in their entirety.

[0471] The term “intrabody” refers to a form of antibody that is not secreted from a cell in which it is produced, but instead targets one or more intracellular proteins. Intrabodies may be used to affect a multitude of cellular processes including, but not limited to intracellular trafficking, transcription, translation, metabolic processes, proliferative signaling and cell division. In some embodiments, methods of the present invention may include intrabody-based therapies. In some such embodiments, variable domain sequences and/or CDR sequences disclosed herein may be incorporated into one or more constructs for intrabody-based therapy.

[0472] As used herein, the term “monoclonal antibody” refers to an antibody obtained from a population of substantially homogeneous cells (or clones), i.e., the individual antibodies comprising the population are identical and/or bind the same epitope, except for possible variants that may arise during production of the monoclonal antibodies, such variants generally being present in minor amounts. In contrast to polyclonal antibody preparations that typically include different antibodies directed against different determinants (epitopes), each monoclonal antibody is directed against a single determinant on the antigen.

[0473] The modifier “monoclonal” indicates the character of the antibody as being obtained from a substantially homogeneous population of antibodies, and is not to be construed as requiring production of the antibody by any particular method. The monoclonal antibodies herein include “chimeric” antibodies (immunoglobulins) in which a portion of the heavy and/or light chain is identical with or homologous to corresponding sequences in antibodies derived from a particular species or belonging to a particular antibody class or subclass, while the remainder of the chain(s) is identical with or homologous to corresponding sequences in antibodies derived from another species or belonging to another antibody class or subclass, as well as fragments of such antibodies.

[0474] As used herein, the term “humanized antibody” refers to a chimeric antibody comprising a minimal portion from one or more non-human (e.g., murine) antibody source(s) with the remainder derived from one or more human immunoglobulin sources. For the most part, humanized antibodies are human immunoglobulins (recipient antibody) in which residues from the hypervariable region from an antibody of the recipient are replaced by residues from the hypervariable region from an antibody of a non-human species (donor antibody) such as mouse, rat, rabbit or nonhuman primate having the desired specificity, affinity, and/or capacity. In one embodiment, the antibody may be a humanized full-length antibody. As a non-limiting example, the antibody may have been humanized using the methods taught in US Patent Publication NO. US20130303399, the contents of which are herein incorporated by reference in its entirety.

[0475] As used herein, the term “antibody variant” refers to a modified antibody (in relation to a native or starting antibody) or a biomolecule resembling a native or starting antibody in structure and/or function (e.g., an antibody mimetic). Antibody variants may be altered in their amino acid sequence, composition or structure as compared to a native antibody. Antibody variants may include, but are not limited to, antibodies with altered isotypes (e.g., IgA, IgD, IgE, IgG1, IgG2, IgG3, IgG4, or IgM), humanized variants, optimized variants, multispecific antibody variants (e.g., bispecific variants), and antibody fragments.

[0476] In some embodiments, pharmaceutical compositions, biocircuits, biocircuit components, effector modules including their SREs or payloads of the present invention may be antibody mimetics. As used herein, the term “antibody mimetic” refers to any molecule which mimics the function or effect of an antibody and which binds specifically and with high affinity to their molecular targets. In some embodiments, antibody mimetics may be monobodies, designed to incorporate the fibronectin type III domain (Fn3) as a protein scaffold (U.S. Pat. Nos. 6,673,901; 6,348,584). In some embodiments, antibody mimetics may be those known in the art including, but are not limited to affibody molecules, affilins, affitins, anticalins, avimers, Centyrins, DARPINS™, Fynomers and Kunitz and domain peptides. In other embodiments, antibody mimetics may include one or more non-peptide regions.

[0477] In one embodiment, the antibody may comprise a modified Fc region. As a non-limiting example, the modified Fc region may be made by the methods or may be any of the regions described in US Patent Publication NO. US20150065690, the contents of which are herein incorporated by reference in its entirety.

[0478] In some embodiments, payloads of the invention may encode multispecific antibodies that bind more than one epitope. As used herein, the terms “multibody” or “multispecific antibody” refer to an antibody wherein two or more variable regions bind to different epitopes. The epitopes may be on the same or different targets. In one embodiment, the multispecific antibody may be generated and optimized by the methods described in International Patent Publication NO. WO2011109726 and US Patent Publication NO. US20150252119, the contents of which each of which are herein incorporated by reference in their entirety. These antibodies are able to bind to multiple antigens with high specificity and high affinity.

[0479] In certain embodiments, a multi-specific antibody is a “bispecific antibody” which recognizes two different epitopes on the same or different antigens. In one aspect, bispecific antibodies are capable of binding two different antigens. Such antibodies typically comprise antigen-binding regions from at least two different antibodies. For example, a bispecific monoclonal antibody (BsMAb, BsAb) is an artificial protein composed of fragments of two different monoclonal antibodies, thus allowing the BsAb to bind to two different types of antigen. Bispecific antibody frameworks may include any of those described in Riethmuller, G., 2012. Cancer Immunity, 2012, 12:12-18; Marvin et al., Acta Pharmacologica Sinica. 2005, 26(6):649-658; and Schaefer et al., PNAS. 2011, 108(27): 11187-11192, the contents of each of which are herein incorporated by reference in their entirety. New generations of BsMAb, called “trifunctional bispecific” antibodies, have been developed. These consist of two heavy and two light chains, one each from two different antibodies, where the two Fab regions (the arms) are directed against two antigens, and the Fc region (the foot) comprises the two heavy chains and forms the third binding site.

[0480] In some embodiments, payloads may encode antibodies comprising a single antigen-binding domain. These molecules are extremely small, with molecular weights approximately one-tenth of those observed for full-sized mAbs. Further antibodies may include “nanobodies” derived from the antigen-binding variable heavy chain regions (VHHs) of heavy chain antibodies found in camels and llamas, which lack light chains (Nelson, A. L., MAbs. 2010. January-Februray; 2(1):77-83).

[0481] In some embodiments, the antibody may be “miniaturized”. Among the best examples of mAb miniaturization are the small modular immunopharmaceuticals (SMIPs) from Trubion Pharmaceuticals. These molecules, which can be monovalent or bivalent, are recombinant single-chain molecules containing one VL, one VH antigen-binding domain, and one or two constant “effector” domains, all connected by linker domains. Presumably, such a molecule might offer the advantages of increased tissue or tumor penetration claimed by fragments while retaining the immune effector functions conferred by constant domains. At least three “miniaturized” SMIPs have entered clinical development. TRU-015, an anti-CD20 SMIP developed in collaboration with Wyeth, is the most advanced project, having progressed to Phase 2 for rheumatoid arthritis (RA). Earlier attempts in systemic lupus erythrematosus (SLE) and B cell lymphomas were ultimately discontinued. Trubion and Facet Biotechnology are collaborating in the development of TRU-016, an anti-CD37 SMIP, for the treatment of CLL and other lymphoid neoplasias, a project that has reached Phase 2. Wyeth has licensed the anti-CD20 SMIP SBI-087 for the treatment of autoimmune diseases, including RA, SLE and possibly multiple sclerosis, although these projects remain in the earliest stages of clinical testing. (Nelson, A. L., MAbs, 2010. January-Februray; 2(1):77-83).

[0482] On example of miniaturized antibodies is called “unibody” in which the hinge region has been removed from IgG4 molecules. While IgG4 molecules are unstable and can exchange light-heavy chain heterodimers with one another, deletion of the hinge region prevents heavy chain-heavy chain pairing entirely, leaving highly specific monovalent light/heavy heterodimers, while retaining the Fc region to ensure stability and half-life in vivo. This configuration may minimize the risk of immune activation or oncogenic growth, as IgG4 interacts poorly with FcRs and monovalent unibodies fail to promote intracellular signaling complex formation (see, e.g., Nelson, A. L., MAbs, 2010. January-Februray; 2(1):77-83).

[0483] In some embodiments, payloads of the invention may encode single-domain antibodies (sdAbs, or nanobodies) which are antibody fragment consisting of a single monomeric variable antibody domain. Like a whole antibody, it is able to bind selectively to a specific antigen. In one aspect, a sdAb may be a “Camel Ig or “camelid VHH”. As used herein, the term “camel Ig” refers to the smallest known antigen-binding unit of a heavy chain antibody (Koch-No lte, et al, FASEB J., 2007, 21: 3490-3498). A “heavy chain antibody” or a “camelid antibody” refers to an antibody that contains two VH domains and no light chains (Riechmann L. et al, J. Immunol. Methods, 1999, 231: 25-38; International patent publication NOs. WO1994/04678 and WO1994/025591; and U.S. Pat. No. 6,005,079). In another aspect, a sdAb may be a “immunoglobulin new antigen receptor” (IgNAR). As used herein, the term “immunoglobulin new antigen receptor” refers to class of antibodies from the shark immune repertoire that consist of homodimers of one variable new antigen receptor (VNAR) domain and five constant new antigen receptor (CNAR) domains. IgNARs represent some of the smallest known immunoglobulin-based protein scaffolds and are highly stable and possess efficient binding characteristics. The inherent stability can be attributed to both (i) the underlying Ig scaffold, which presents a considerable number of charged and hydrophilic surface exposed residues compared to the conventional antibody VH and VL domains found in murine antibodies; and (ii) stabilizing structural features in the complementary determining region (CDR) loops including inter-loop disulphide bridges, and patterns of intra-loop hydrogen bonds.

[0484] In some embodiments, payloads of the invention may encode intrabodies. Intrabodies are a form of antibody that is not secreted from a cell in which it is produced, but instead targets one or more intracellular proteins. Intrabodies are expressed and function intracellularly, and may be used to affect a multitude of cellular processes including, but not limited to intracellular trafficking, transcription, translation, metabolic processes, proliferative signaling and cell division. In some embodiments, methods described herein include intrabody-based therapies. In some such embodiments, variable domain sequences and/or CDR sequences disclosed herein are incorporated into one or more constructs for intrabody-based therapy. For example, intrabodies may target one or more glycated intracellular proteins or may modulate the interaction between one or more glycated intracellular proteins and an alternative protein.

[0485] The intracellular expression of intrabodies in different compartments of mammalian cells allows blocking or modulation of the function of endogenous molecules (Biocca, et al., EMBO J. 1990, 9: 101-108; Colby et al., Proc. Natl. Acad. Sci. U.S.A. 2004, 101: 17616-17621). Intrabodies can alter protein folding, protein-protein, protein-DNA, protein-RNA interactions and protein modification. They can induce a phenotypic knockout and work as neutralizing agents by direct binding to the target antigen, by diverting its intracellular trafficking or by inhibiting its association with binding partners. With high specificity and affinity to target antigens, intrabodies have advantages to block certain binding interactions of a particular target molecule, while sparing others.

[0486] Sequences from donor antibodies may be used to develop intrabodies. Intrabodies are often recombinantly expressed as single domain fragments such as isolated VH and VL domains or as a single chain variable fragment (scFv) antibody within the cell. For example, intrabodies are often expressed as a single polypeptide to form a single chain antibody comprising the variable domains of the heavy and light chains joined by a flexible linker polypeptide. Intrabodies typically lack disulfide bonds and are capable of modulating the expression or activity of target genes through their specific binding activity. Single chain intrabodies are often expressed from a recombinant nucleic acid molecule and engineered to be retained intracellularly (e.g., retained in the cytoplasm, endoplasmic reticulum, or periplasm). Intrabodies may be produced using methods known in the art, such as those disclosed and reviewed in: (Marasco et al., PNAS, 1993, 90: 7889-7893; Chen et al., Hum. Gene Ther. 1994, 5:595-601; Chen et al., 1994, PNAS, 91: 5932-5936; Maciejewski et al., 1995, Nature Med., 1: 667-673; Marasco, 1995, Immunotech, 1: 1-19; Mhashilkar, et al., 1995, EMBO J. 14: 1542-51; Chen et al., 1996, Hum. Gene Therap., 7: 1515-1525; Marasco, Gene Ther. 4:11-15, 1997; Rondon and Marasco, 1997, Annu. Rev. Microbiol. 51:257-283; Cohen, et al., 1998, Oncogene 17:2445-56; Proba et al., 1998, J. Mol. Biol. 275:245-253; Cohen et al., 1998, Oncogene 17:2445-2456; Hassanzadeh, et al., 1998, FEBS Lett. 437:81-6; Richardson et al., 1998, Gene Ther. 5:635-44; Ohage and Steipe, 1999, J. Mol. Biol. 291:1119-1128; Ohage et al., 1999, J. Mol. Biol. 291:1129-1134; Wirtz and Steipe, 1999, Protein Sci. 8:2245-2250; Zhu et al., 1999, J. Immunol. Methods 231:207-222; Arafat et al., 2000, Cancer Gene Ther. 7:1250-6; der Maur et al., 2002, J. Biol. Chem. 277:45075-85; Mhashilkar et al., 2002, Gene Ther. 9:307-19; and Wheeler et al., 2003, FASEB J. 17: 1733-5; and references cited therein).

[0487] In some aspects, payloads of the invention may encode biosynthetic antibodies as described in U.S. Pat. No. 5,091,513, the contents of which are herein incorporated by reference in their entirety. Such antibody may include one or more sequences of amino acids constituting a region which behaves as a biosynthetic antibody binding site (BABS). The sites comprise 1) non-covalently associated or disulfide bonded synthetic VH and VL dimers, 2) VH-VL or VL-VH single chains wherein the VH and VL are attached by a polypeptide linker, or 3) individuals VH or VL domains. The binding domains comprise linked CDR and FR regions, which may be derived from separate immunoglobulins. The biosynthetic antibodies may also include other polypeptide sequences which function, e.g., as an enzyme, toxin, binding site, or site of attachment to an immobilization media or radioactive atom. Methods are disclosed for producing the biosynthetic antibodies, for designing BABS having any specificity that can be elicited by in vivo generation of antibody, and for producing analogs thereof.

[0488] In some embodiments, payloads may encode antibodies with antibody acceptor frameworks taught in U.S. Pat. No. 8,399,625. Such antibody acceptor frameworks may be particularly well suited accepting CDRs from an antibody of interest.

[0489] In one embodiment, the antibody may be a conditionally active biologic protein. An antibody may be used to generate a conditionally active biologic protein which are reversibly or irreversibly inactivated at the wild type normal physiological conditions as well as to such conditionally active biologic proteins and uses of such conditional active biologic proteins are provided. Such methods and conditionally active proteins are taught in, for example, International Publication No. WO2015175375 and WO2016036916 and US Patent Publication No. US20140378660, the contents of each of which are incorporated herein by reference in their entirety.

### Antibody Preparations

[0490] The preparation of antibodies, whether monoclonal or polyclonal, is known in the art. Techniques for the production of antibodies are well known in the art and described, e.g. in Harlow and Lane “Antibodies, A Laboratory Manual”, Cold Spring Harbor Laboratory Press, 1988; Harlow and Lane “Using Antibodies: A Laboratory Manual” Cold Spring Harbor Laboratory Press, 1999 and “Therapeutic Antibody Engineering: Current and Future Advances Driving the Strongest Growth Area in the Pharmaceutical Industry” Woodhead Publishing, 2012.

[0491] The antibodies and fragments and variants thereof as described herein can be produced using recombinant polynucleotides. In one embodiment, the polynucleotides have a modular design to encode at least one of the antibodies, fragments or variants thereof. As a non-limiting example, the polynucleotide construct may encode any of the following designs: (1) the heavy chain of an antibody, (2) the light chain of an antibody, (3) the heavy and light chain of the antibody, (4) the heavy chain and light chain separated by a linker, (5) the VH1, CH1, CH2, CH3 domains, a linker and the light chain or (6) the VH1, CH1, CH2, CH3 domains, VL region, and the light chain. Any of these designs may also comprise optional linkers between any domain and/or region. The polynucleotides of the present invention may be engineered to produce any standard class of immunoglobulins using an antibody described herein or any of its component parts as a starting molecule.

[0492] Recombinant antibody fragments may also be isolated from phage antibody libraries using techniques well known in the art and described in e.g. Clackson et al., 1991, Nature 352: 624-628; Marks et al., 1991, J. Mol. Biol. 222: 581-597. Recombinant antibody fragments may be derived from large phage antibody libraries generated by recombination in bacteria (Sblattero and Bradbury, 2000, Nature Biotechnology 18:75-80; the contents of which are incorporated herein by reference in its entirety).

### Antibodies Used for Immunotherapy

[0493] In some embodiments, payloads of the present invention may be antibodies, fragments and variants thereof which are specific to tumor specific antigens (TSAs) and tumor associated antigens (TAAs). Antibodies circulate throughout the body until they find and attach to the TSA/TAA. Once attached, they recruit other parts of the immune system, increasing ADCC (antibody dependent cell-mediated cytotoxicity) and ADCP (antibody dependent cell-mediated phagocytosis) to destroy tumor cells. As used herein, the term “tumor specific antigen (TSA)” means an antigenic substance produced in tumor cells, which can trigger an anti-tumor immune response in a host organism. In one embodiment, a TSA may be a tumor neoantigen. The tumor antigen specific antibody mediates complement-dependent cytotoxic response against tumor cells expressing the same antigen.

[0494] In some embodiments, the tumor specific antigens (TSAs), tumor associated antigens (TAAs), pathogen associated antigens, or fragments thereof can be expressed as a peptide or as an intact protein or portion thereof. The intact protein or a portion thereof can be native or mutagenized. Antigens associated with cancers or virus-induced cancers as described herein are well-known in the art. Such a TSA or TAA may be previously associated with a cancer or may be identified by any method known in the art.

[0495] In one embodiment, the antigen is CD19, a B-cell surface protein expressed throughout B-cell development. CD19 is a well-known B cell surface molecule, which upon B cell receptor activation enhances B-cell antigen receptor induced signaling and expansion of B cell populations. CD19 is broadly expressed in both normal and neoplastic B cells. Malignancies derived from B cells such as chronic lymphocytic leukemia, acute lymphocytic leukemia and many non-Hodgkin lymphomas frequently retain CD19 expression. This near universal expression and specificity for a single cell lineage has made CD19 an attractive target for immunotherapies. Human CD19 has 14 exons wherein exon 1-4 encode the extracellular portion of the CD19, exon 5 encodes the transmembrane portion of CD19 and exons 6-14 encode the cytoplasmic tail.

[0496] In one embodiment, payloads of the present invention may be antibodies, fragments and variants thereof which are specific to CD19 antigen.

[0497] In one embodiment, the payload of the invention may be a FMC63 antibody, antibody fragment of variant. FMC63 is an IgG2a mouse monoclonal antibody clone specific to the CD19 antigen that reacts with CD19 antigen on cells of the B cell lineage. The epitope of CD19 recognized by the FMC63 antibody is in exon 2 (Sotillo et al (2015) Cancer Discov; 5(12):1282-95; the contents of which are incorporated by reference in their entirety). In some embodiments, the payload of the invention may be other CD19 monoclonal antibody clones including but not limited to 4G7, SJ25C1, CVID3/429, CVID3/155, HIB19, and J3-119.

[0498] In some embodiments, the payloads of the present invention may include variable heavy chain and variable light chain comprising the amino acid sequences selected from those in Table 9.

TABLE 9
Variable Heavy and Light Chain Sequences

| | Antibody | SEQ ID | |
|---|---|---|---|
| Target | chain | NO | Source |
| CD19 | VH | 4365 | SEQ ID NO: 28 in WO2016168773A3 |
| CD19 | VH | 4366 | SEQ ID NO: 29 in WO2016168773A3 |
| CD19 | VH | 4367 | SEQ ID NO: 32 in WO2016168773A3 |
| CD19 | VH | 4368 | SEQ ID NO: 33 in WO2016168773A3 |
| CD19 | VH | 4369 | SEQ ID NO: 34 in WO2016168773A3 |
| CD19 | VH | 4370 | SEQ ID NO: 35 in WO2016168773A3 |
| CD19 | VH | 4371 | SEQ ID NO: 51 in WO2016187349A1 |
| CD19 | VH | 4372 | SEQ ID NO: 20 in US20160039942 |
| CD19 | VH | 4373 | SEQ ID NO. 1 in WO2014184143 |
| CD19 | VH | 4374 | SEQ ID NO. 5 in US20160145337A1 |
| CD19 | VH | 4375 | SEQ ID NO: 15 in US20160319020 |
| CD19 | VH | 4376 | SEQ ID NO: 166 in US20160152723 |
| CD19 | VH | 4377 | SEQ ID NO: 167 in US20160152723 |
| CD19 | VH | 4378 | SEQ ID NO: 168 in US20160152723 |
| CD19 | VH | 4379 | SEQ ID NO: 17 in EP3057991A1 |
| CD19 | VH | 4380 | SEQ ID NO: 172 in US20160152723 |
| CD19 | VH | 4381 | SEQ ID NO: 176 in US20160152723 |
| CD19 | VH | 4382 | SEQ ID NO: 177 in US20160152723 |
| CD19 | VH | 4383 | SEQ ID NO: 181 in US20160152723 |
| CD19 | VH | 4384 | SEQ ID NO: 183 in US20160152723 |
| CD19 | VH | 4385 | SEQ ID NO: 184 in US20160152723 |
| CD19 | VH | 4386 | SEQ ID NO: 185 in US20160152723 |
| CD19 | VH | 4387 | SEQ ID NO: 62 in US20160152723 |
| CD19 | VH | 4388 | SEQ ID NO: 62 in WO2016097231 |
| CD19 | VH | 4389 | SEQ ID NO. 12 in WO2016134284 |
| CD19 | VH | 4390 | SEQ ID NO: 111 in US20160333114A1 |
| CD19 | VH | 4391 | SEQ ID NO: 113 in US20160333114A1 |
| CD19 | VH | 4392 | SEQ ID NO: 33 in EP3057994A1 |
| CD19 | VH | 4393 | SEQ ID NO: 34 in EP3057994A1 |
| CD19 | VH | 4394 | SEQ ID NO: 35 in EP3057994A1 |
| CD19 | VH | 4395 | SEQ ID NO. 53 in WO2016120216 |
| CD19 | VH | 4396 | SEQ ID NO. 55 in WO2016120216 |
| CD19 | VK | 4397 | SEQ ID NO: 13 in US20160319020 |
| CD19 | VK | 4398 | SEQ ID NO: 6 in US20160319020 |
| CD19 | VL | 4399 | SEQ ID NO: 27 in WO2016168773A3 |
| CD19 | VL | 4400 | SEQ ID NO: 31 in WO2016168773A3 |
| CD19 | VL | 4401 | SEQ ID NO: 49 in WO2016187349A1 |
| CD19 | VL | 4402 | SEQ ID NO. 11 in WO2016134284 |
| CD19 | VL | 4403 | SEQ ID NO. 194 in US20140134142A1 |
| CD19 | VL | 4404 | SEQ ID NO. 54 in WO2016120216 |
| CD19 | VL | 4405 | SEQ ID NO. 56 in WO2016120216 |
| CD19 | VL | 4406 | SEQ ID NO: 13 in US20160152723 |
| CD19 | VL | 4407 | SEQ ID NO: 14 in US20160152723 |
| CD19 | VL | 4408 | SEQ ID NO: 15 in US20160152723 |
| CD19 | VL | 4409 | SEQ ID NO: 16 in US20160152723 |
| CD19 | VL | 4410 | SEQ ID NO: 17 in US20160152723 |
| CD19 | VL | 4411 | SEQ ID NO: 186 in US20160152723 |
| CD19 | VL | 4412 | SEQ ID NO: 187 in US20160152723 |
| CD19 | VL | 4413 | SEQ ID NO: 188 US20160152723 |
| CD19 | VL | 4414 | SEQ ID NO: 189 in US20160152723 |
| CD19 | VL | 4415 | SEQ ID NO: 192 in US20160152723 |
| CD19 | VL | 4416 | SEQ ID NO: 196 in US20160152723 |
| CD19 | VL | 4417 | SEQ ID NO: 197 in US20160152723 |
| CD19 | VL | 4418 | SEQ ID NO: 198 in US20160152723 |
| CD19 | VL | 4419 | SEQ ID NO: 199 in US20160152723 |
| CD19 | VL | 4420 | SEQ ID NO: 200 in US20160152723 |
| CD19 | VL | 4421 | SEQ ID NO: 201 in US20160152723 |
| CD19 | VL | 4422 | SEQ ID NO: 202 in US20160152723 |
| CD19 | VL | 4423 | SEQ ID NO: 203 in US20160152723 |
| CD19 | VL | 4424 | SEQ ID NO: 204 in US20160152723 |
| CD19 | VL | 4425 | SEQ ID NO: 205 in US20160152723 |
| CD19 | VL | 4426 | SEQ ID NO: 22 in US20160039942 |
| CD19 | VL | 4427 | SEQ ID NO: 63 in WO2016097231 |
| CD19 | VL | 4428 | SEQ ID NO: 64 in US20160152723 |
| CD19 | VL | 4429 | SEQ ID NO: 66 in US20160152723 |
| CD19 | VL | 4430 | SEQ ID NO: 67 in US20160152723 |
| CD19 | VL | 4431 | SEQ ID NO: 68 in US20160152723 |
| CD19 | VL | 4432 | SEQ ID NO: 69 in US20160152723 |
| CD19 | VL | 4433 | SEQ ID NO: 70 in US20160152723 |
| CD19 | VL | 4434 | SEQ ID NO: 71 in US20160152723 |
| CD19 | VL | 4435 | SEQ ID NO: 91 in US20160152723 |
| CD19 | VL | 4436 | SEQ ID NO. 3 in US20160145337A1 |
| CD19 | VL | 4437 | SEQ ID NO: 112 in US20160333114A1 |
| CD19 | VL | 4438 | SEQ ID NO: 114 in US20160333114A1 |

[0499] A tumor specific antigen (TSA) may be a tumor neoantigen. A neoantigen is a mutated antigen that is only expressed by tumor cells because of genetic mutations or alterations in transcription which alter protein coding sequences, therefore creating novel, foreign antigens. The genetic changes result from genetic substitution, insertion, deletion or any other genetic changes of a native cognate protein (i.e. a molecule that is expressed in normal cells). In the context of CD19, neoantigens such as a transcript variant of CD19 lacking exon 2 or lacking exon 5-6 or both have been described (see International patent publication No. WO2016061368; the contents of which are incorporated herein by reference in their entirety). Since FMC63 binding epitope is in exon 2, CD19 neoantigen lacking exon 2 is not recognized by FMC63 antibody. Thus, in some embodiments, payloads of the invention may include FMC63-distinct antibodies, or fragments thereof. As used herein “FMC63-distinct” refers, to an antibody or fragment thereof that is immunologically specific and binds to an epitope of the CD19 antigen that is different or unlike the epitope of CD19 antigen that is bound by FMC63. In some instances, antibodies of the invention may include CD19 antibodies, antibody fragments or variants that recognize CD19 neoantigens including the CD19 neoantigen lacking exon2. In one embodiment, the antibody or fragment thereof is immunologically specific to the CD19 encoded by exon 1, 3 and/or 4. In one example, the antibody or fragment thereof is specific to the epitope that bridges the portion of CD19 encoded by exon 1 and the portion of CD19 encoded by exon 3.

[0500] In one embodiment, the antigen may be GD2 ganglioside. In one embodiment, payloads of the present invention may be antibodies, fragments and variants thereof which are specific to GD2 antigen. Gangliosides expressed on the tumor cell surface can be targets for cancer immunotherapy. GD2 is a disialoganglioside with a molecular formula of C74H134N4032. Gangliosides are acidic glycosphingolipids found on the outer surface of most cell membranes. They are ideal targets for immunotherapy because of the high antigen density, lack of modulation, relative homogeneity in many tumors and the possibility of up regulation by cytokines. Many tumors have abnormal glycolipid composition and structure. GD2 has been found in a wide spectrum of human tumors, including those of neuroectodermal or epithelial origin, virtually all melanomas, and approximately 50% of tumor samples from osteosarcoma and soft tissue sarcoma. Antibodies with high affinity for GD2 include, but not limited to 1B7, 2H12, 1G2, 1E9, 1H3, 2F5, 2F7, 31F9, 31F9V2, 32E2, chl4.18, hul4.18, 3F8, 8B6, 4B5, 1A7, A1G4, GD2 mimotopes, hul4.18K322A, 5F11, 3G6, 14g2a, and 14.18. In one embodiment, the GD antibody is the 14g2a antibody (Mujoo K., et al. (1989) Cancer Res. 1; 49(11):2857-61; the contents of which are incorporated herein by reference in its entirety). Any of the GD2 antibodies described in Long A. H. et al. (2015) Nat Med. 21(6):581-90; the contents of which are incorporated by reference in their entirety).

[0501] In one embodiment, the antigen is HER2 antigen. In one embodiment, payloads of the present invention may be antibodies, fragments and variants thereof which are specific to HER2 antigen. HER2 is the oncogene product of human epidermal cell growth factor receptor 2 related oncogenes and is a transmembrane receptor protein having a molecular weight of 185 kDa and having a tyrosine kinase domain. HER2 is a member of the EGFR family consisting of HER1 (EGFR, ERBB1), HER2 (neu, ERBB-2), HER2 (ErbB-3), and Her4 (ErbB-4) and is known to be autophosphorylated at intracellular tyrosine residues by its homodimer formation or heterodimer formation with another EGFR receptor HER1, HER3, HER4 and is activated in this manner. Thereby playing an important role in cell growth, differentiation, and survival in normal cells and tumor cells. In some embodiments, HER2 antibodies useful in the present invention may include 3B5 (from Oncogene Science/BAYER), 2C4 (ATCC HB-12697), 7C2 (ATCC HB-12215), ApoB17F/ocHER2, 8A4 (ATCC PTA-4565), A10A12 (ATCC PTA-4566), 9G6, 7H4, AlOE9, A12D6, A6B12, A10E11, B3G4, A5C7, 13A11, 11C11, 13E11, Her2Bi (OKT3 x 9184), Her2Bi (OKT3 x Herc), 7F3 (ATCC HB-12216), huMAb4D5-1, huMAb4D5-2, huMAb4D5-3, huMAb4D5-4, huMAb4D5-6, huMAb4D5-7, 520C9, CB-11 (from Novocastra Laboratories), NCLB12 (from Novocastra Laboratories), humanized 2C4 mutant 560, humanized 2C4 mutant 561, humanized 2C4 mutant 562, humanized 2C4 mutant 568, humanized 2C4 mutant 569, humanized 2C4 mutant 570, humanized 2C4 mutant 571, humanized 2C4 mutant 56869, 3E8, 3H4, Cl 11 (NeoMarkers), HER-81, 452F2, 736G9, 741F8, 758G5, 761B10, anti-p185HER2/FcγRIII (CD16), anti-CD3/anti-p185HER2, Hu4D5-8 and variants, 4D5-H, CB11 (from Ventana Medical Scientific Instruments), 6E9, 2H111, 5B8, 7D3, HER50, HER66, HER70, scFv C6.5, scFv C6ML3-9 (ML3.9 or C6ML3.9), scFv C6MH3-B1 (B1 or C6MH3.B1), scFv C6-B1D2, (B1D2 or C6MH3-B1D2), ALM, L87, N28, N12, MGr6, 9GG.10 (Neomarkers), MGFc-5 (V379M), MGFc-9 (F243I, V379L), MGFc-10 (K288N, A330S, P396L), MGFc-13 (K334E, T359N, T366S), MGFc-27 (G316D, A378V, D399E), MGFc-37 (K248M), MGFc-39 (E293V Q295E, A327T), MGFc-38 (K392T, P396L), MGFc-41 (H268N, P396L), MGFc-23 (K334E, R292L), MGFc-44, MGFc-45, MDX-210, 17.6.4, HER2-PY1248, MAb74, FRP5, TAb250, HER-81, PN2A, mAb 191924 (R&D systems), IDMI, scFv23, Ab-3, Ab-5, 2502A, Rexomun, MAB-1129 (R&D systems), and MM-111. In one embodiment, antibodies with high affinity may be derived from any of the HER2 antibody heavy and light chain variables described in Table 7.

[0502] In one embodiment of the present invention, the antigen is CD33. In one embodiment, payloads of the present invention may be antibodies, fragments and variants thereof which are specific to CD33 antigen. Acute myeloid leukemia (AML) is the second most common acute leukemia in the United States. The commonly applied therapy of leukemic disease includes irradiation and/or chemotherapy. However, very often 65-80% of patients receiving treatment relapse because the cells that survived the chemotherapy are enriched in AML leukemia stem cells (AML-LSCs), and constitute a reservoir of cells capable of re-expanding and causing a relapse. AML-LSCs express a characteristic set of cell surface antigens including among other CD33. CD33 (Sialic acid binding Ig-like lectin 3) or SIGLEC3 (UNIPROT ID: P20138) is a transmembrane receptor expressed on cells of myeloid lineage. It is usually considered myeloid specific, but it can also be found on some lymphoid cells. It binds to sialic acid, therefore is a member of the SIGLEC family of lectins. Exemplary antibodies targeting CD33 may include, but are not limited to M195, M2H12, DRB2, My 9-6. In one embodiment, the antibody is derived from My9.6. In some embodiments, antibodies with high affinity may be derived from any of the CD33 antibody heavy and light chain variables described in Table 10.

[0503] In one embodiment, the antigen of the present invention is a BCMA (B-cell maturation antigen), also referred to as the CD269. In one embodiment, payloads of the present invention may be antibodies, fragments and variants thereof which are specific to BCMA antigen. BCMA antigen (UNIPROT ID: Q02223) is encoded by the gene, TNFRS17. BCMA is a member of the TNF receptor super family. It binds to B cell activating factor (BAFF) and a proliferation inducing ligand (APRIL). Among non-malignant cells, BCMA has been reported to be expressed mostly by plasma cells and subsets of mature B cells, but not T cells and NK cells. Therefore, BCMA represents a suitable therapeutic candidate in the treatment of multiple myeloma. Exemplary antibodies targeting BCMA include, but are not limited to BCMA 50, BCMA30, C11D5.3 and C13F12.1. In one embodiment, the antibody is derived from C11D5.3. In some embodiments, antibodies with high affinity may be derived from any of the BCMA antibody heavy and light chain variables described in Table 10.

[0504] In one embodiment, the antigen of the present invention is a CD276 (also known as B7-H3). In one embodiment, payloads of the present invention may be antibodies, fragment, and variants thereof which are specific to CD276. CD276 is expressed in a variety of human tumors, including pediatric solid tumors and adult carcinomas. Any of the CD276 antibodies taught in International Patent publications WO2017044699 and WO2014160627 (the contents of which are incorporated herein by reference in their entirety), may be useful in the present invention. In some embodiments, antibodies with high affinity may be derived from any of the CD276 antibody heavy and light chain variables described in Table 10.

[0505] In one embodiment, the antigen of the present invention is a ALK protein. The developmentally-regulated cell surface receptor tyrosine kinase, ALK is known to be expressed as a tumor associated antigen as a fusion protein resulting from a chromosomal translocation. Cancer associated ALK was first described as a 2; 5 translocation associated with nucleophosphomin (NPM) in anaplastic large cell leukemia. The fusion protein is composed of intracellular component of NPM fused to ALK. In some embodiments, the ALK antigen may be the extracellular portion of the protein. Any of the antibodies, fragment and variants specific to ALK may be useful in the present invention. In one embodiment, the ALK antibodies described in the International Patent Publication, WO2015069922 (the contents of which are incorporated by reference herein in its entirety). In some embodiments, antibodies with high affinity may be derived from any of the ALK antibody heavy and light chain variables described in Table 10.

[0506] In one embodiment, the antigen of the present invention is a CD22 antigen. In one embodiment, payloads of the present invention may be antibodies, fragment, and variants thereof which are specific to CD22. CD22 is a lineage restricted B cell antigen belonging to the immunoglobulin (Ig) superfamily. CD22 is expressed in 60-70% of B cell lymphomas and leukemias (e.g. B-chronic lymphocytic leukemia, hairy cell leukemia, acute lymphocytic leukemia (ALL) and Burkit's lymphoma) and is not present on the cell surface in early stages of B cell development or on to stem cells. In some embodiments, the antibodies, fragments, and variants thereof may be any of those taught in International Patent Publications, WO2016149578, WO2014065961, and WO2013059593A1 (the contents of each of which are incorporated by reference in its entirety). In some embodiments, antibodies with high affinity may be derived from any of the CD22 antibody heavy and light chain variables described in Table 10.

[0507] In some embodiments, the payloads of the present invention may include an antigen binding region comprising variable heavy chain and variable light chains with the amino acid sequences selected from those in Table 10.

TABLE 10
Variable Heavy and Light Chain Sequences

| | Description and Clone | | Antibody | SEQ ID |
|---|---|---|---|---|
| Target | name | Source | chain | NO. |
| ALK | ALK15 VH | SEQ ID NO. 1 in WO2015069922 | VH | 4439 |
| ALK | ALK48 VH | SEQ ID NO. 3 in WO2015069922 | VH | 4440 |
| ALK | ALK53 VH | SEQ ID NO. 5 in WO2015069922 | VH | 4441 |
| ALK | ALK58 VH | SEQ ID NO. 7 in WO2015069922 | VH | 4442 |
| ALK | humanized ALK15 VH | SEQ ID NO. 9 in WO2015069922 | VH | 4443 |
| ALK | humanized ALK48 VH | SEQ ID NO. 11 in WO2015069922 | VH | 4444 |
| ALK | humanized ALK53 VH | SEQ ID NO. 13 in WO2015069922 | VH | 4445 |
| ALK | humanized ALK58 VH | SEQ ID NO. 15 in WO2015069922 | VH | 4446 |
| ALK | ALK15 VL | SEQ ID NO. 2 in WO2015069922 | VL | 4447 |
| ALK | ALK48 VL | SEQ ID NO. 4 in WO2015069922 | VL | 4448 |
| ALK | ALK53 VL | SEQ ID NO. 6 in WO2015069922 | VL | 4449 |
| ALK | ALK58 VL | SEQ ID NO. 8 in WO2015069922 | VL | 4450 |
| ALK | humanized ALK15 VL | SEQ ID NO. 10 in WO2015069922 | VL | 4451 |
| ALK | humanized ALK48 VL | SEQ ID NO. 12 in WO2015069922 | VL | 4452 |
| ALK | humanized ALK53 VL | SEQ ID NO. 14 in WO2015069922 | VL | 4453 |
| ALK | humanized ALK58 VL | SEQ ID NO. 16 in WO2015069922 | VL | 4454 |
| CD22 | CD22 VL | SEQ ID NO. 14 in WO2016149578 | VL | 4455 |
| CD22 | CD22 (HA22 or BL22) VL | SEQ ID NO. 1 in WO2013059593 | VL | 4456 |
| CD22 | CD22 VH | SEQ ID NO. 13 in WO2016149578 | VH | 4457 |
| CD22 | CD22 (HA22 or BL22) VH | SEQ ID NO. 3 in WO2013059593 | VH | 4458 |
| CD22 | CD22 (HA22 or BL22) VH | SEQ ID NO. 4 in WO2013059593 | VH | 4459 |
| CD276 | CD276 VH | SEQ ID NO. 7 in WO2017044699 | VH | 4460 |
| CD276 | CD276 VH (CD276.6 (m856)) | SEQ ID NO. 7 in WO2014160627 | VH | 4461 |
| CD276 | CD276 VH (CD276.1 (m851)) | SEQ ID NO. 17 in WO2014160627 | VH | 4462 |
| CD276 | CD276 VH (CD276.17 (m8517)) | SEQ ID NO. 26 in WO2014160627 | VH | 4463 |
| CD276 | CD276 VL | SEQ ID NO. 8 in WO2017044699 | VL | 4464 |
| CD276 | CD276 VL (CD276.6 (m856)) | SEQ ID NO. 8 in WO2014160627 | VL | 4465 |
| CD276 | CD276 VL (CD276.1 (m851)) | SEQ ID NO. 18 in WO2014160627 | VL | 4466 |
| CD276 | CD276 VL (CD276.17 (m8517)) | SEQ ID NO. 27 in WO2014160627 | VL | 4467 |
| GD2 | 3F8 heavy chain variable | SEQ ID No. 1 in WO2011160119 | VH | 4468 |
| GD2 | 3F8 light chain variable | SEQ ID No. 2 in WO2011160119 | VL | 4469 |
| GD2 | 3F8 heavy chain variable | SEQ ID No. 3 in WO2011160119 | VH | 4470 |
| GD2 | humanized 3F8 heavy chain variable | SEQ ID No. 4 in WO2011160119 | VH | 4471 |
| GD2 | humanized 3F8 light chain variable | SEQ ID No. 5 in WO2011160119 | VL | 4472 |
| GD2 | humanized 3F8 heavy chain 2 variable | SEQ ID No. 6 in WO2011160119 | VH | 4473 |
| GD2 | humanized 3F8 light chain 2 variable | SEQ ID No. 7 in WO2011160119 | VL | 4474 |
| GD2 | humanized 3F8 heavy chain variable | SEQ ID No. 8 in WO2011160119 | VH | 4475 |
| GD2 | Human GD2 heavy chain variable | SEQ ID No. 16 in WO2010002822A1 | VH | 4476 |
| GD2 | Human GD2 light chain variable | SEQ ID No. 32 in WO2010002822A1 | VL | 4477 |
| GD2 | chimeric Ch3F8 heavy chain-gamma 1 | Cheung et al., Oncoimmunology, | VH | 4478 |
| | | 2012, 1(4): 477-486 | | |
| GD2 | chimeric Ch3F8 light chain-kappa | Cheung et al., Oncoimmunology, | VL | 4479 |
| | | 2012, 1(4): 477-486 | | |
| GD2 | humanized Hu3F8 heavy chain-gamma1 | Cheung et al., Oncoimmunology, | VH | 4480 |
| | | 2012, 1(4): 477-486 | | |
| GD2 | humanized Hu3F8 light chain-kappa | Cheung et al., Oncoimmunology, | VL | 4481 |
| | | 2012, 1(4): 477-486 | | |
| GD2 | Chimeric Ch3F8 heavy chain-gamma4 | Cheung et al., Oncoimmunology, | VH | 4482 |
| | | 2012, 1(4): 477-486 | | |
| GD2 | humanized Hu3F8 heavy chain-gamma4 | Cheung et al., Oncoimmunology, | VL | 4483 |
| | | 2012, 1(4): 477-486 | | |
| GD2 | GD2 VH | SEQ ID NO. 17 in WO2016134284 | VH | 4484 |
| GD2 | GD2 VL | SEQ ID NO. 18 in WO2016134285 | VL | 4485 |
| GD2 | Murine KM666 VH (heavy chain variable | SEQ ID NO. 9 in WO2015132604 | VH | 4486 |
| | region) sequence | | | |
| GD2 | Humanized KM666 VH sequence | SEQ ID NO. 10 in WO2015132604 | VH | 4487 |
| GD2 | Murine KM666 VL (light chain variable | SEQ ID NO. 11 in WO2015132604 | VL | 4488 |
| | region) sequence | | | |
| GD2 | Humanized KM666 VL sequence | SEQ ID NO. 12 in WO2015132604 | VL | 4489 |
| GD2 | GD2 VL | SEQ ID NO. 1 in US20040203100 | VL | 4490 |
| GD2 | GD2 VH | SEQ ID NO. 2 in US20040203100 | VH | 4491 |
| GD2 | Murine KM666 VH (heavy chain variable | SEQ ID NO. 9 in US20170066838 | VH | 4492 |
| | region) sequence | | | |
| GD2 | Humanized KM666 VHs equence | SEQ ID NO. 10 in US20170066838 | VH | 4493 |
| GD2 | Murine KM666 VL (light chain variable | SEQ ID NO. 11 in US20170066838 | VL | 4494 |
| | region) sequence | | | |
| GD2 | Humanized KM666 VL sequence | SEQ ID NO. 12 in US20170066838 | VL | 4495 |
| GD2 | GD2 VL | SEQ ID NO. 3 in US20160304620 | VL | 4496 |
| GD2 | GD2 VH | SEQ ID NO. 4 in US20160304620 | VH | 4497 |
| GD2 | GD2 VH | SEQ ID NO. 2 in US20150353645 | VH | 4498 |
| GD2 | GD2 VL | SEQ ID NO. 4 in US20150353645 | VL | 4499 |
| GD2 | GD2 VH | SEQ ID NO. 6 in US20150353645 | VH | 4500 |
| GD2 | GD2 VL | SEQ ID NO. 8 in US20150353645 | VL | 4501 |
| GD2 | GD2 VH | SEQ ID NO. 10 in US20150353645 | VH | 4502 |
| GD2 | GD2 VL | SEQ ID NO. 12 in US20150353645 | VL | 4503 |
| GD2 | GD2 VH | SEQ ID NO. 14 in US20150353645 | VH | 4504 |
| GD2 | GD2 VL | SEQ ID NO. 16 in US20150353645 | VL | 4505 |
| GD2 | GD2 VH | SEQ ID NO. 18 in US20150353645 | VH | 4506 |
| GD2 | GD2 VL | SEQ ID NO. 20 in US20150353645 | VL | 4507 |
| GD2 | GD2 VH | SEQ ID NO. 22 in US20150353645 | VH | 4508 |
| GD2 | GD2 VL | SEQ ID NO. 24 in US20150353645 | VL | 4509 |
| GD2 | GD2 VH | SEQ ID NO. 26 in US20150353645 | VH | 4510 |
| GD2 | GD2 VL | SEQ ID NO. 28 in US20150353645 | VL | 4511 |
| GD2 | GD2 VH | SEQ ID NO. 30 in US20150353645 | VH | 4512 |
| GD2 | GD2 VL | SEQ ID NO. 32 in US20150353645 | VL | 4513 |
| GD2 | GD2 VH | SEQ ID NO. 34 in US20150353645 | VH | 4514 |
| GD2 | GD2 VH | SEQ ID NO. 36 in US20150353645 | VH | 4515 |
| GD2 | GD2 VL | SEQ ID NO. 38 in US20150353645 | VL | 4516 |
| GD2 | GD2 VH | SEQ ID NO. 40 in US20150353645 | VH | 4517 |
| GD2 | GD2 VL | SEQ ID NO. 42 in US20150353645 | VL | 4518 |
| GD2 | GD2 VL | SEQ ID NO. 3 in US20150139942 | VL | 4519 |
| GD2 | GD2 VH | SEQ ID NO. 4 in US20150139942 | VH | 4520 |
| GD2 | GD2 VL | SEQ ID NO. 7 in US20150139942 | VL | 4521 |
| GD2 | GD2 VH | SEQ ID NO. 8 in US20150139942 | VH | 4522 |
| GD2 | GD2 VH | SEQ ID NO. 16 in US20130287691 | VH | 4523 |
| GD2 | GD2 VL | SEQ ID NO. 32 in US20130287691 | VL | 4524 |
| GD2 | GD2 VH | SEQ ID NO. 40 in US20130287691 | VH | 4525 |
| GD2 | GD2 VL | SEQ ID NO. 42 in US20130287691 | VL | 4526 |
| GD2 | GD2 VL | SEQ ID NO. 3 in US20140134162 | VL | 4527 |
| GD2 | GD2 VH | SEQ ID NO. 4 in US20140134162 | VH | 4528 |
| GD2 | GD2 VH | SEQ ID NO. 20 in WO2017055385 | VH | 4529 |
| GD2 | GD2 VL | SEQ ID NO. 20 in WO2017055385 | VL | 4530 |
| GD2 | GD2 VH | SEQ ID NO. 3 in WO2013189516 | VH | 4531 |
| GD2 | GD2 VL | SEQ ID NO. 4 in WO2013189516 | VL | 4532 |
| GD2-0- | KM8B6 GD2-0-acetylated heavy chain | SEQ ID No. 1 in WO2008043777 | VH | 4533 |
| acetylated | variable | | | |
| GD2-0- | KM8B6 GD2-0-acetylated light chain | SEQ ID No. 2 in WO2008043777 | VL | 4534 |
| acetylated | variable | | | |
| GD2-0- | O-acetylated-GD2vganglioside light chain | SEQ ID No. 6 in WO2015067375 | VL | 4535 |
| acetylated | variable region | | | |
| GD2-0- | O-acetylated-GD2vganglioside heavy chain | SEQ ID No. 7 in WO2015067375 | VH | 4536 |
| acetylated | variable region | | | |
| GD2-0- | GD2 VL | SEQ ID NO. 7 in US20160068608 | VL | 4537 |
| acetylated | | | | |
| GD2-0- | GD2 VH | SEQ ID NO. 8 in US20160068608 | VH | 4538 |
| acetylated | | | | |
| GD2-0- | GD2 VL (8B6) | SEQ ID NO. 7 in WO2014177271A1 | VL | 4539 |
| acetylated | | | | |
| GD2-0- | GD2 VH (8B6) | SEQ ID NO. 8 in WO2014177271A1 | VH | 4540 |
| acetylated | | | | |
| GD2-0- | GD2 VL | SEQ ID NO. 9 in WO2014177271A1 | VL | 4541 |
| acetylated | | | | |
| GD2-0- | GD2 VH | SEQ ID NO. 10 in WO2014177271A1 | VH | 4542 |
| acetylated | | | | |
| Gangliosides | GMab1-VH | SEQ ID No. 11 in WO2012071216 | VH | 4543 |
| (including | | | | |
| GD2) | | | | |
| Gangliosides | GMab1-VH | SEQ ID No. 12 in WO2012071216 | VL | 4544 |
| (including | | | | |
| GD2) | | | | |
| Gangliosides | GMab1-VL | SEQ ID No. 13 in WO2012071216 | VH | 4545 |
| (including | | | | |
| GD2) | | | | |
| Gangliosides | GMab2-VH | SEQ ID No. 14 in WO2012071216 | VL | 4546 |
| (including | | | | |
| GD2) | | | | |
| CD33 | Anti CD33 VH (Clone M195) | SEQ ID NO. 11 in WO2015150526 | VH | 4547 |
| CD33 | Anti CD33 VL (Clone M195) | SEQ ID NO. 12 in WO2015150526 | VL | 4548 |
| CD33 | Anti CD33 VH (Clone M2H12) | SEQ ID NO. 13 in WO2015150526 | VH | 4549 |
| CD33 | Anti CD33 VL (Clone M2H12) | SEQ ID NO. 14 in WO2015150526 | VL | 4550 |
| CD33 | Anti CD33 VH (Clone DRB2) | SEQ ID NO. 15 in WO2015150526 | VH | 4551 |
| CD33 | Anti CD33 VL (Clone DRB2) | SEQ ID NO. 16 in WO2015150526 | VL | 4552 |
| CD33 | Anti CD33 VH (Clone My9-6) | SEQ ID NO. 17 in WO2015150526 | VH | 4553 |
| CD33 | Anti CD33 VL (Clone My9-6) | SEQ ID NO. 18 in WO2015150526 | VL | 4554 |
| BCMA | BCMA VH (Clone BCMA-50) | SEQ ID NO. 11 in WO2015158671 | VH | 4555 |
| BCMA | BCMA VL (Clone BCMA-50) | SEQ ID NO. 12 in WO2015158672 | VL | 4556 |
| BCMA | BCMA VH (Clone BCMA-30) | SEQ ID NO. 13 in WO2015158673 | VH | 4557 |
| BCMA | BCMA VL (Clone BCMA-30) | SEQ ID NO. 14 in WO2015158674 | VL | 4558 |
| BCMA | BCMA VH (Clone C11D5.3) | SEQ ID NO. 15 in WO2015158675 | VH | 4559 |
| BCMA | BCMA VL (Clone C11D5.3) | SEQ ID NO. 16 in WO2015158676 | VL | 4560 |
| BCMA | BCMA VH (Clone C13F12.1) | SEQ ID NO. 17 in WO2015158677 | VH | 4561 |
| BCMA | BCMA VL (Clone C13F12.1) | SEQ ID NO. 18 in WO2015158678 | VL | 4562 |
| Her2 | Trastuzumab (Herceptin) | SEQ ID NO. 1 in WO2017093844 | VH | 4563 |
| Her2 | Trastuzumab (Herceptin) | SEQ ID NO. 7 in WO2017093844 | VL | 4564 |
| Her2 | huMAb4D5-5 | SEQ ID NO. 1 in U.S. Pat. No. 8,075,890 | VL | 4565 |
| Her2 | huMAb4D5-5 | SEQ ID NO. 2 in U.S. Pat. No. 8,075,890 | VH | 4566 |
| Her2 | a consensus antibody variable domain | SEQ ID NO. 3 in U.S. Pat. No. 8,075,890 | VL | 4567 |
| Her2 | a consensus antibody variable domain | SEQ ID NO. 4 in U.S. Pat. No. 8,075,890 | VH | 4568 |
| Her2 | muMAb4D5 | SEQ ID NO. 5 in U.S. Pat. No. 8,075,890 | VL | 4569 |
| Her2 | muMAb4D5 | SEQ ID NO. 6 in U.S. Pat. No. 8,075,890 | VH | 4570 |
| Her2 | N29 | No SEQ ID in WO1993003741 | VH | 4571 |
| Her2 | N29 | No SEQ ID in WO1993003741 | VL | 4572 |
| Her2 | 2C4 | SEQ ID NO. 1 in U.S. Pat. No. 7,981,418 | VL | 4573 |
| Her2 | 2C4 | SEQ ID NO. 2 in U.S. Pat. No. 7,981,418 | VH | 4574 |
| Her2 | variant 574/Pertuzumab | SEQ ID NO. 3 in U.S. Pat. No. 7,981,418 | VL | 4575 |
| Her2 | variant 574/Pertuzumab | SEQ ID NO. 4 in U.S. Pat. No. 7,981,418 | VH | 4576 |
| Her2 | human VL consensus (hum. kappa. 1, light | SEQ ID NO. 5 in U.S. Pat. No. 7,981,418 | VL | 4577 |
| | kappa subgroup 1) | | | |
| Her2 | human VH consensus (humIII, heavy | SEQ ID NO. 6 in U.S. Pat. No. 7,981,418 | VH | 4578 |
| | subgroup III) | | | |
| Her2 | Pertuzumab | SEQ ID NO. 13 in U.S. Pat. No. 7,981,418 | VL | 4579 |
| Her2 | Pertuzumab | SEQ ID NO. 14 in U.S. Pat. No. 7,981,418 | VH | 4580 |
| Her2 | trastuzumab/humMAb4 D5-8 | SEQ ID NO. 15 in U.S. Pat. No. 7,981,418 | VL | 4581 |
| Her2 | trastuzumab/humMAb4 D5-8 | SEQ ID NO. 16 in U.S. Pat. No. 7,981,418 | VH | 4582 |
| Her2 | a variant Pertuzumab light chain sequence | SEQ ID NO. 17 in U.S. Pat. No. 7,981,418 | VL | 4583 |
| Her2 | a variant Pertuzumab heavy chain sequence | SEQ ID NO. 18 in U.S. Pat. No. 7,981,418 | VH | 4584 |
| Her2 | 3. F2 monoclonal antibody | SEQ ID NO. 2 in WO2001009187 | VH | 4585 |
| Her2 | 3. F2 monoclonal antibody | SEQ ID NO. 4 in WO2001009187 | VL | 4586 |
| Her2 | 1. D2 monoclonal antibody | SEQ ID NO. 6 in WO2001009187 | VH | 4587 |
| Her2 | 1. D2 monoclonal antibody | SEQ ID NO. 8 in WO2001009187 | VL | 4588 |
| Her2 | 2. E8 monoclonal antibody | SEQ ID NO. 10 in WO2001009187 | VH | 4589 |
| Her2 | 2. E8 monoclonal antibody | SEQ ID NO. 12 in WO2001009187 | VL | 4590 |
| Her2 | 2C4 | SEQ ID NO. 4 in U.S. Pat. No. 7,097,840 | VL | 4591 |
| Her2 | variant 574/Pertuzumab | SEQ ID NO. 5 in U.S. Pat. No. 7,097,840 | VL | 4592 |
| Her2 | human VL subgroup | SEQ ID NO. 6 in U.S. Pat. No. 7,097,840 | VL | 4593 |
| Her2 | 4D5 | SEQ ID NO. 14 in WO2003068801 | VH | 4594 |
| Her2 | Hu4D5-8 | SEQ ID NO. 1 in WO2003087131 | VL | 4595 |
| Her2 | rhuMAb | SEQ ID NO. 50 in US20040254108 | VH | 4596 |
| Her2 | rhuMAb | SEQ ID NO. 52 in US20040254108 | VL | 4597 |
| Her2 | her2VHCH-SM5-1 VH; human kappa chain | SEQ ID NO. 54 in US20040254108 | VH | 4598 |
| | constant (CH) | | | |
| Her2 | her2VLCL-SM5-1 VL; human kappa chain | SEQ ID NO. 56 in US20040254108 | VL | 4599 |
| | constant (CL) | | | |
| Her2 | her2VH/Fc/FL- rhuMAb VH; IgG1 Fc; | SEQ ID NO. 58 in US20040254108 | VH | 4600 |
| | Flt3 ligand extracellular region (hFLex) | | | |
| Her2 | her2VH/Fc/Link/FL-rhuMAb; IgG1 Fc; | SEQ ID NO. 60 in US20040254108 | VH | 4601 |
| | linker; Flt3 ligand extracellular region | | | |
| | (hFLex) | | | |
| Her2 | Herceptin Fab | SEQ ID NO. 9 in US20050260711A1 | VL | 4602 |
| Her2 | Herceptin Fab | SEQ ID NO. 10 in US20050260711A1 | VH | 4603 |
| Her2 | Pertuzumab with a signal peptide sequence | SEQ ID NO. 17 in US20060018899 | VL | 4604 |
| Her2 | Pertuzumab with a signal peptide sequence | SEQ ID NO. 18 in US20060018899 | VH | 4605 |
| Her2 | Periplasmic Fab-4D5 | SEQ ID NO. 30 in U.S. Pat. No. 7,632,924 | VL | 4606 |
| Her2 | Periplasmic Fab-4D5 | SEQ ID NO. 31 in U.S. Pat. No. 7,632,924 | VH | 4607 |
| Her2 | trastuzumab A88C | SEQ ID NO. 6 in U.S. Pat. No. 7,521,541 | VH | 4608 |
| Her2 | trastuzumab A121C | SEQ ID NO. 7 in U.S. Pat. No. 7,521,541 | VH | 4609 |
| Her2 | trastuzumab V11OC | SEQ ID NO. 8 in U.S. Pat. No. 7,521,541 | VL | 4610 |
| Her2 | B1D2 | SEQ ID NO. 42 in U.S. Pat. No. 7,332,585 | VH | 4611 |
| Her2 | B1D2 | SEQ ID NO. 47 in U.S. Pat. No. 7,332,585 | VL | 4612 |
| Her2 | Fab63 | SEQ ID NO. 7 in US20100047230 | VH | 4613 |
| Her2 | Fab63 | SEQ ID NO. 8 in US20100047230 | VL | 4614 |
| Her2 | Herceptin | SEQ ID NO. 3 in US20160256561 | VH | 4615 |
| Her2 | anti-her2/neu antibody with a signal peptide | SEQ ID NO. 1 in U.S. Pat. No. 9,534,057 | VH | 4616 |
| Her2 | anti-her2/neu antibody with a signal peptide | SEQ ID NO. 2 in U.S. Pat. No. 9,534,057 | VL | 4617 |
| anti-Her2/ | anti-Her2/neu-anti-CD3 bispecific | SEQ ID NO. 3 in WO2014079000A1 | VH | 4618 |
| neu-anti-CD3 | antibody VH | | | |

### 3. Therapeutic Agents

[0508] In some embodiments, payloads of the present invention may be a therapeutic agent, such as a cancer therapeutic agent, an immunotherapeutic agent, an anti-pathogen agent or a gene therapy agent. In some aspects, the immunotherapeutic agent may be a TCR receptor, a chimeric antigen receptor (CAR), a chimeric switch receptor, an antagonist of a co-inhibitory molecule, an agonist of a co-stimulatory molecule, a cytokine, a cytokine receptor, a chemokine, a chemokine receptor, a metabolic factor, a homing receptor and a safety switch.

[0509] In some embodiments, payloads of the present invention may be chimeric antigen receptors (CARs) which when transduced into immune cells (e.g., T cells and NK cells), can redirect the immune cells against the target (e.g., a tumor cell) which expresses a molecule recognized by the extracellular target moiety of the CAR.

[0510] As used herein, the term “chimeric antigen receptor (CAR)” refers to a synthetic receptor that mimics TCR on the surface of T cells. In general, a CAR is composed of an extracellular targeting domain, a transmembrane domain/region and an intracellular signaling/activation domain. Cells such as T cells engineered to express a CAR can be redirected to attack target cells that express a molecule which can be recognized by the targeting moiety of the CAR. In a standard CAR receptor, the components: the extracellular targeting domain, transmembrane domain and intracellular signaling/activation domain, are linearly constructed as a single fusion protein. The extracellular region comprises a targeting domain/moiety (e.g., a scFv) that recognizes a specific tumor antigen or other tumor cell-surface molecules. The intracellular region may contain a signaling domain of TCR complex (e.g., the signal region of CD3ζ), and/or one or more costimulatory signaling domains, such as those from CD28, 4-1BB (CD137) and OX-40 (CD134). For example, a “first-generation CAR” only has the CD3ζ signaling domain, whereas in an effort to augment T-cell persistence and proliferation, costimulatory intracellular domains are added, giving rise to second generation CARs having a CD3ζ signal domain plus one costimulatory signaling domain, and third generation CARs having CD3ζ signal domain plus two or more costimulatory signaling domains. A CAR, when expressed by a T cell, endows the T cell with antigen specificity determined by the extracellular targeting moiety of the CAR. Recently, it is also desirable to add one or more elements such as homing and suicide genes to develop a more competent and safer architecture of CAR, so called the fourth-generation CAR.

[0511] A CAR may be capable of binding to a tumor specific antigen selected from 5T4, 707-AP, A33, AFP (α-fetoprotein), AKAP-4 (A kinase anchor protein 4), ALK, α5β1-integrin, androgen receptor, annexin II, alpha-actinin-4, ART-4, B1, B7H3, B7H4, BAGE (B melanoma antigen), BCMA, BCR-ABL fusion protein, beta-catenin, BKT-antigen, BTAA, CA-I (carbonic anhydrase I), CA50 (cancer antigen 50), CA125, CA15-3, CA195, CA242, calretinin, CAIX (carbonic anhydrase), CAMEL (cytotoxic T-lymphocyte recognized antigen on melanoma), CAM43, CAP-1, Caspase-8/m, CD4, CD5, CD7, CD19, CD20, CD22, CD23, CD25, CD27/m, CD28, CD30, CD33, CD34, CD36, CD38, CD40/CD154, CD41, CD44v6, CD44v7/8, CD45, CD49f, CD56, CD68\KP1, CD74, CD79a/CD79b, CD103, CD123, CD133, CD138, CD171, cdc27/m, CDK4 (cyclin dependent kinase 4), CDKN2A, CDS, CEA (carcinoembryonic antigen), CEACAM5, CEACAM6, chromogranin, c-Met, c-Myc, coa-1, CSAp, CT7, CT10, cyclophilin B, cyclin B1, cytoplasmic tyrosine kinases, cytokeratin, DAM-10, DAM-6, dek-can fusion protein, desmin, DEPDC1 (DEP domain containing 1), E2A-PRL, EBNA, EGF-R (epidermal growth factor receptor), EGP-1(epithelial glycoprotein-1) (TROP-2), EGP-2, EGP-40, EGFR (epidermal growth factor receptor), EGFRvIII, EF-2, ELF2M, EMMPRIN, EpCAM (epithelial cell adhesion molecule), EphA2, Epstein Barr virus antigens, Erb (ErbB1; ErbB3; ErbB4), ETA (epithelial tumor antigen), ETV6-AML1 fusion protein, FAP (fibroblast activation protein), FBP (folate-binding protein), FGF-5, folate receptor a, FOS related antigen 1, fucosyl GM1, G250, GAGE (GAGE-1; GAGE-2), galactin, GD2 (ganglioside), GD3, GFAP (glial fibrillary acidic protein), GM2 (oncofetal antigen-immunogenic-1; OFA-I-1), GnT-V, Gp100, H4-RET, HAGE (helicase antigen), HER-2/neu, HIFs (hypoxia inducible factors), HIF-1α, HIF-2α, HLA-A2, HLA-A*0201-R170I, HLA-A11, HMWMAA, Hom/Mel-40, HSP70-2M (Heat shock protein 70), HST-2, HTgp-175, hTERT (or hTRT), human papillomavirus-E6/human papillomavirus-E7 and E6, iCE (immune-capture EIA), IGF-1R, IGH-IGK, IL2R, IL5, ILK (integrin-linked kinase), IMP3 (insulin-like growth factor II mRNA-binding protein 3), IRF4 (interferon regulatory factor 4), KDR (kinase insert domain receptor), KIAA0205, KRAB-zinc finger protein (KID)-3; KID31, KSA (17-1A), K-ras, LAGE, LCK, LDLR/FUT (LDLR-fucosyltransferaseAS fusion protein), LeY (Lewis Y), MAD-CT-1, MAGE (tyrosinase, melanoma-associated antigen) (MAGE-1; MAGE-3), melan-A tumor antigen (MART), MART-2/Ski, MC1R (melanocortin 1 receptor), MDM2, mesothelin, MPHOSPH1, MSA (muscle-specific actin), mTOR (mammalian targets of rapamycin), MUC-1, MUC-2, MUM-1 (melanoma associated antigen (mutated) 1), MUM-2, MUM-3, Myosin/m, MYL-RAR, NA88-A, N-acetylglucosaminyltransferase, neo-PAP, NF-KB (nuclear factor-kappa B), neurofilament, NSE (neuron-specific enolase), Notch receptors, NuMa, N-Ras, NY-BR-1, NY-CO-1, NY-ESO-1, Oncostatin M, OS-9, OY-TES1, p53 mutants, p190 minor bcr-abl, p15(58), pl85erbB2, pl80erbB-3, PAGE (prostate associated gene), PAP (prostatic acid phosphatase), PAX3, PAX5, PDGFR (platelet derived growth factor receptor), cytochrome P450 involved in piperidine and pyrrolidine utilization (PIPA), Pml-RAR alpha fusion protein, PR-3 (proteinase 3), PSA (prostate specific antigen), PSM, PSMA (Prostate stem cell antigen), PRAME (preferentially expressed antigen of melanoma), PTPRK, RAGE (renal tumor antigen), Raf (A-Raf, B-Raf and C-Raf), Ras, receptor tyrosine kinases, RCAS1, RGSS, ROR1 (receptor tyrosine kinase-like orphan receptor 1), RU1, RU2, SAGE, SART-1, SART-3, SCP-1, SDCCAGi6, SP-17 (sperm protein 17), src-family, SSX (synovial sarcoma X breakpoint)-1, SSX-2(HOM-MEL-40), SSX-3, SSX-4, SSX-5, STAT-3, STAT-5, STAT-6, STEAD, STn, survivin, syk-ZAP70, TA-90 (Mac-2 binding proteincyclophilin C-associated protein), TAAL6, TACSTD1 (tumor associated calcium signal transducer 1), TACSTD2, TAG-72-4, TAGE, TARP (T cell receptor gamma alternate reading frame protein), TEL/AML1 fusion protein, TEM1, TEM8 (endosialin or CD248), TGFβ, TIE2, TLP, TMPRSS2 ETS fusion gene, TNF-receptor (TNF-α receptor, TNF-β receptor; or TNF-7 receptor), transferrin receptor, TPS, TRP-1 (tyrosine related protein 1), TRP-2, TRP-2/INT2, TSP-180, VEGF receptor, WNT, WT-1 (Wilm's tumor antigen) and XAGE.

[0512] Exemplary CAR constructs may include a CAR targeting mesothelin (U.S. Pat. Nos. 9,272,002 and 9,359,447); EGFRvIII specific CARs in U.S. Pat. No. 9,266,960; anti-TAG CARs in U.S. Pat. No. 9,233,125; CD19 CARs in US Patent Publication NO. 2016/014533; CD19 CAR having the amino acid sequence of SEQ ID NO. 24 of U.S. Pat. No. 9,328,156; CD19 CARs in U.S. Pat. Nos. 8,911,993, 8,975,071, 9,101,584, 9,102,760, and 9,102,761; BCMA (CD269) specific CARs disclosed in International Patent Publication NOs. WO2016/014565 and WO2016/014789; CLL-1 (C-type lectin-like molecule 1) CARs comprising the amino acid sequences of SEQ ID NOs. 99, 96, 100, 101, 102, 91, 92, 93, 94, 95, 97, 98, 103, and 197 disclosed in International Patent Publication NO. WO2016/014535; CD33 specific CARs comprising the amino acid sequences of SEQ ID NOs. 48-56 in International Patent Publication NO. WO2016/014576; CD33 specific CARs comprising the amino acid sequences of SEQ ID NOs. 19-22, 27-30 and 35-38 in International Patent Publication NO. WO2015/150526; CD37 specific CARs encoded by the nucleic acids of SEQ ID NOs. 1-5 in US patent publication NO. US2015/0329640; GPC3 CAR (International patent publication NO. WO2016/036973), GFRalpha 4 CARs having the amino acid sequences of SEQ ID NOs. 85, 86, 90, 92, 94, 96, 98, 100, 102, and 104 in International Patent Publication NO. WO2016/025880; CD123 CARs comprising the amino acid sequences of SEQ ID NOs. 98, 99, 100 and 101 in International Patent Publication NOs. WO2016/028896; CD123 specific multi-chain CARs in International Patent Publication NO. WO2015/193406; ROR-1 specific CARs comprising the amino acid sequences of SEQ ID NOs. 93, 95 and 117 in International Patent Publication NO. WO2016/016344; ROR-1 specific multi-chain CARs in International patent publication NO. WO2016/016343; trophoblast glycoprotein (5T4, TPBG) specific CARs comprising the amino acid sequences of SEQ ID NOs. 21, 27, 33, 39, 23, 29, 34, 41, 19, 25, 31, 37, 20, 26, 32, 38, 22, 28, 34, 40, 24, 30, 36 and 42 in International Patent Publication NO. WO2016/034666; EGFRvIII specific CARs comprising the amino acid sequences of SEQ ID NOs. 15, 17, 24, 25, 26 and 27 in International Patent Publication NO. WO2016016341; a TEM 8 CAR comprising the amino acid sequence of SEQ ID NO. 1 in International Patent Publication NO. WO2014164544, a TEMI CAR comprising the amino acid sequence of SEQ ID NO. 2 in International Patent Publication NO. WO2014164544; GPC-3 CAR having the amino acid sequences of SEQ ID NOs. 3 and 26 in International Patent Publication NO. WO2016/049459; a chondroitin sulfate proteoglycan-4 (CSPG4) CAR in International Patent Publication NO. WO2015/080981; Kappa/lambda CARs in International Patent Publication NO. WO2015/164739; the contents of each of which are incorporated herein by reference in their entirety.

[0513] In some embodiments, the CAR constructs may include CAIX (carboxy-anhydrase-IX (CAIX) specific CAR (Lamers et al., Biochem Soc Trans, 2016, 44(3): 951-959), HIV-1 specific CAR (Ali et al., J Virol., 2016, May 25, pii: JVI.00805-16), CD20 specific CAR (Rufener et al., Cancer Immunol. Res., 2016, 4(6): 509-519), a CD20/CD19 bispecific CAR (Zah et al., Cancer Immunol Res., 2016, 4(6): 498-508), and EGFR specific CARs; the contents of each of which are incorporated herein by reference in their entirety.

[0514] In one embodiment of the present invention, the payload of the invention is a CD19 specific CAR operably linked to human DHFR DD. In some embodiments, the amino acid sequences of the CD19 CAR may comprise the components and sequences listed in Table 11. Nucleic acid sequences encoding the amino acid sequences are also described in Table 11. In the Table, the transmembrane domain is underlined to differentiate it from the adjacent sequence components. In Table 11, the amino acid sequences may comprise a stop codon at the end which is denoted in the table with a “*”. In the Table 11, constructs OT-CD19N-008 to OT-CD19-011 are driven by a CMV promoter and constructs OT-CD19-014 and 015 are driven by an EF1a promoter. The position of the mutated amino acids listed in Table 11 is relative to the wildtype human DHFR (Uniprot ID: P00374) of SEQ ID NO. 1.

TABLE 11
Amino acid sequences of the CD19 CAR and its components

| | | Amino | Nucleic |
|---|---|---|---|
| | | Acid | Acid SEQ |
| | | SEQ | ID NO or |
| Description | Amino Acid Sequence | ID NO | Sequence |
| CD19 scFv | DIQMTQTTSSLSASLGDRVTISCRASQDISKYLNW | 1294 | 4619- |
| | YQQKPDGTVKLLIYHTSRLHSGVPSRFSGSGSGTD | | 4623 |
| | YSLTISNLEQEDIATYFCQQGNTLPYTFGGGTKLEI | | |
| | TGGGGSGGGGSGGGGSEVKLQESGPGLVAPSQSL | | |
| | SVTCTVSGVSLPDYGVSWIRQPPRKGLEWLGVIW | | |
| | GSETTYYNSALKSRLTIIKDNSKSQVFLKMNSLQT | | |
| | DDTAIYYCAKHYYYGGSYAMDYWGQGTSVTVSS | | |
| CD8α hinge + TM | TTTPAPRPPTPAPTIASQPLSLRPEACRPAAGGAVH | 1300 | 4624 |
| | TRGLDFACDIYIWAPLAGTCGVLLLSLVITLYC | | |
| CD8α hinge | TTTPAPRPPTPAPTIASQPLSLRPEACRPAAGGAVH | 1302 | 4625- |
| | TRGLDFACD | | 4629 |
| CD3 zeta signaling | RVKFSRSADAPAYKQGQNQLYNELNLGRREEYD | 1308 | 4630- |
| domain | VLDKRRGRDPEMGGKPRRKNPQEGLYNELQKDK | | 4634 |
| | MAEAYSEIGMKGERRRGKGHDGLYQGLSTATKD | | |
| | TYDALHMQALPPR | | |
| 4-1BB intracellular | KRGRKKLLYIFKQPFMRPVQTTQEEDGCSCRFPEE | 1314 | 4635- |
| signaling domain | EEGGCEL | | 4639 |
| CD8α leader | MALPVTALLLPLALLLHAARP | 1320 | 4640- |
| | | | 4644 |
| | | | 4645- |
| | | | 4647 |
| Linker | GGSGG | 1329 | 1331, |
| | | | 4648- |
| | | | 4651 |
| Linker | SG | — | |
| Modified Furin | ESRRVRRNKRSK | 1336 | 4652- |
| | | | 4654 |
| hDHFR (Amino acid 2- | VGSLNIVAVSQNMGIGKNGDLPWPPLRNEFRYF | 13 | 4655 |
| 187 of WT)(Y122I) | QRMTTTSSVEGKQNLVIMGKKTWFSIPEKNRPLK | | |
| | GRINLVLSRELKEPPQGAHFLSRSLDDALKLTEQP | | |
| | ELANKVDMVWIVGGSSVIKEAMNHPGHLKLFVT | | |
| | RIMQDFESDTFFPEIDLEKYKLLPEYPGVLSDVQEE | | |
| | KGIKYKFEVYEKND | | |
| hDHFR (Amino acid 2- | VGSLNCIVAVSQNMGIGKNGDLPWPPLRNEFRYF | 41 | 4656 |
| 187 of WT)(Y122I, | QRMTTTSSVEGKQNLVIMGKKTWFSIPEKNRPLK | | |
| A125F) | GRINLVLSRELKEPPQGAHFLSRSLDDALKLTEQP | | |
| | ELANKVDMVWIVGGSSVIKEFMNHPGHLKLFVTR | | |
| | IMQDFESDTFFPEIDLEKYKLLPEYPGVLSDVQEEK | | |
| | GIKYKFEVYEKND | | |
| hDHFR (Amino acid 2- | VGSLNCIVAVSQNMGIGKNGDLPWPPLRNEFRYF | 38 | 4657 |
| 187 of WT)(Q36K, | KRMTTTSSVEGKQNLVIMGKKTWFSIPEKNRPLK | | |
| Y122I) | GRINLVLSRELKEPPQGAHFLSRSLDDALKLTEQP | | |
| | ELANKVDMVWIVGGSSVIKEAMNHPGHLKLFVT | | |
| | RIMQDFESDTFFPEIDLEKYKLLPEYPGVLSDVQEE | | |
| | KGIKYKFEVYEKND | | |
| hDHFR (Amino acid 2- | VGSLNCIVAVSQNMGIGKNGDLPWPPLRNEFRYF | 56 | 4658 |
| 187 of WT)(Q36F, | FRMTTTSSVEGKQNLVIMGKKTWFSIPEKFRPLKG | | |
| N65F, Y122I) | RINLVLSRELKEPPQGAHFLSRSLDDALKLTEQPEL | | |
| | ANKVDMVWIVGGSSVIKEAMNHPGHLKLFVTRI | | |
| | MQDFESDTFFPEIDLEKYKLLPEYPGVLSDVQEEK | | |
| | GIKYKFEVYEKND | | |
| OT-CD19-008 (OT- | MALPVTALLLPLALLLHAARPDIQMTQTTSSLSAS | 1340 | 4659 |
| CD19C-008)(CD8a | LGDRVTISCRASQDISKYLNWYQQKPDGTVKLLIY | | |
| leader; CD19 scFv; | HTSRLHSGVPSRFSGSGSGTDYSLTISNLEQEDIAT | | |
| CD8a hinge + TM; | YFCQQGNTLPYTFGGGTKLEITGGGGSGGGGSGG | | |
| 41BB; CD3zeta; linker; | GGSEVKLQESGPGLVAPSQSLSVTCTVSGVSLPDY | | |
| (GGSGG (SEQ ID NO: | GVSWIRQPPRKGLEWLGVIWGSETTYYNSALKSR | | |
| 2729)); hDHFR | LTIIKDNSKSQVFLKMNSLQTDDTAIYYCAKHYY | | |
| (Amino acid 2-187 of | YGGSYAMDYWGQGTSVTVSSTTTPAPRPPTPAPTI | | |
| WT)(Y122I); stop) | ASQPLSLRPEACRPAAGGAVHTRGLDFACDIYIW | | |
| | APLAGTCGVLLLSLVITLYCKRGRKKLLYIFKQPF | | |
| | MRPVQTTQEEDGCSCRFPEEEEGGCELRVKFSRSA | | |
| | DAPAYKQGQNQLYNELNLGRREEYDVLDKRRGR | | |
| | DPEMGGKPRRKNPQEGLYNELQKDKMAEAYSEI | | |
| | GMKGERRRGKGHDGLYQGLSTATKDTYDALHM | | |
| | QALPPRGGSGGVGSLNCIVAVSQNMGIGKNGDLP | | |
| | WPPLRNEFRYFQRMTTTSSVEGKQNLVIMGKKT | | |
| | WFSIPEKNRPLKGRINLVLSRELKEPPQGAHFLSRS | | |
| | LDDALKLTEQPELANKVDMVWIVGGSSVIKEAM | | |
| | NHPGHLKLFVTRIMQEDFESDTFFPEIDLEKYKLLPE | | |
| | YPGVLSDVQEEKGIKYKFEVYEKND* | | |
| OT-CD19-009 (OT- | MALPVTALLLPLALLLHAARPDIQMTQTTSSLSAS | 1341 | 4660 |
| CD19C-009)(CD8a | LGDRVTISCRASQDISKYLNWYQQKPDGTVKLLIY | | |
| leader; CD19 scFv; | HTSRLHSGVPSRFSGSGSGTDYSLTISNLEQEDIAT | | |
| CD8a hinge + TM; | YFCQQGNTLPYTFGGGTKLEITGGGGSGGGGSGG | | |
| 41BB; CD3zeta; linker; | GGSEVKLQESGPGLVAPSQSLSVTCTVSGVSLPDY | | |
| hDHFR(Amino acid 2- | GVSWIRQPPRKGLEWLGVIWGSETTYYNSALKSR | | |
| 187 of WT)(Y122I, | LTIIKDNSKSQVFLKMNSLQTDDTAIYYCAKHYY | | |
| A125F); stop) | YGGSYAMDYWGQGTSVTVSSTTTPAPRPPTPAPTI | | |
| | ASQPLSLRPEACRPAAGGAVHTRGLDFACDIYIW | | |
| | APLAGTCGVLLLSLVITLYCKRGKKLLYIFKQPF | | |
| | MRPVQTTQEEDGCSCRFPEEEEGGCELRVKFSRSA | | |
| | DAPAYKQGQNQLYNELNLGRREEYDVLDKRRGR | | |
| | DPEMGGKPRRKNPQEGLYNELQKDKMAEAYSEI | | |
| | GMKGERRRGKGHDGLYQGLSTATKDTYDALHM | | |
| | QALPPRGGSGGVGSLNCIVAVSQNMGIGKNGDLP | | |
| | WPPLRNEFRYFQRMTTTSSVEGKQNLVIMGKKT | | |
| | WFSIPEKNRPLKGRINLVLSRELKEPPQGAHFLSRS | | |
| | LDDALKLTEQPELANKVDMVWIVGGSSVIKEFMN | | |
| | HPGHLKLFVTRIMQDFESDTFFPEIDLEKYKLLPEY | | |
| | PGVLSDVQEEKGIKYKFEVYEKND* | | |
| OT-CD19-010 (OT- | MALPVTALLLPLALLLHAARPDIQMTQTTSSLSAS | 1342 | 4661 |
| CD19C-010)(CD8a | LGDRVTISCRASQDISKYLNWYQQKPDGTVKLLIY | | |
| leader; CD19 scFv; | HTSRLHSGVPSRFSGSGSGTDYSLTISNLEQEDIAT | | |
| CD8a hinge + TM; | YFCQQGNTLPYTFGGGTKLEITGGGGSGGGGSGG | | |
| 41BB; CD3zeta; linker; | GGSEVKLQESGPGLVAPSQSLSVTCTVSGVSLPDY | | |
| hDHFR(Amino acid 2- | GVSWIRQPPRKGLEWLGVIWGSETTYYNSALKSR | | |
| 187 of WT)(Q36K, | LTIIKDNSKSQVFLKMNSLQTDDTAIYYCAKHYY | | |
| Y122I); stop) | YGGSYAMDYWGQGTSVTVSSTTTPAPRPPTPAPTI | | |
| | ASQPLSLRPEACRPAAGGAVHTRGLDFACDIYIW | | |
| | APLAGTCGVLLLSLVITLYCKRGRKKLLYIFKQPF | | |
| | MRPVQTTQEEDGCSCRFPEEEEGGCELRVKFSRSA | | |
| | DAPAYKQGQNQLYNELNLGRREEYDVLDKRRGR | | |
| | DPEMGGKPRRKNPQEGLYNELQKDKMAEAYSEI | | |
| | GMKGERRRGKGHDGLYQGLSTATKDTYDALHM | | |
| | QALPPRGGSGGVGSLNCIVAVSQNMGIGKNGDLP | | |
| | WPPLRNEFRYFKRMTTTSSVEGKQNLVIMGKKT | | |
| | WFSIPEKNRPLKGRINLVLSRELKEPPQGAHFLSRS | | |
| | LDDALKLTEQPELANKVDMVWIVGGSSVIKEAM | | |
| | NHPGHLKLFVTRIMQDFESDTFFPEIDLEKYKLLPE | | |
| | YPGVLSDVQEEKGIKYKFEVYEKND* | | |
| OT-CD19-011 (OT- | MALPVTALLLPLALLLHAARPDIQMTQTTSSLSAS | 1343 | 4662 |
| CD19C-011)(CD8a | LGDRVTISCRASQDISKYLNWYQQKPDGTVKLLIY | | |
| leader; CD19 scFv; | HTSRLHSGVPSRFSGSGSGTDYSLTISNLEQEDIAT | | |
| CD8a hinge + TM; | YFCQQGNTLPYTFGGGTKLEITGGGGSGGGGSGG | | |
| 41BB; CD3zeta; linker; | GGSEVKLQESGPGLVAPSQSLSVTCTVSGVSLPDY | | |
| hDHFR (Amino acid 2- | GVSWIRQPPRKGLEWLGVIWGSETTYYNSALKSR | | |
| 187 of WT)(Q36F, | LTIIKDNSKSQVFLKMNSLQTDDTAIYYCAKHYY | | |
| N65F, Y122I); stop) | YGGSYAMDYWGQGTSVTVSSTTTPAPRPPTPAPTI | | |
| | ASQPLSLRPEACRPAAGGAVHTRGLDFACDIYIW | | |
| | APLAGTCGVLLLSLVITLYCKRGRKKLLYIFKQPF | | |
| | MRPVQTTQEEDGCSCRFPEEEEGGCELRVKFSRSA | | |
| | DAPAYKQGQNQLYNELNLGRREEYDVLDKRRGR | | |
| | DPEMGGKPRRKNPQEGLYNELQKDKMAEAYSEI | | |
| | GMKGERRRGKGHDGLYQGLSTATKDTYDALHM | | |
| | QALPPRGGSGGVGSLNCIVAVSQNMGIGKNGDLP | | |
| | WPPLRNEFRYFFRMTTTSSVEGKQNLVIMGKKTW | | |
| | FSIPEKFRPLKGRINLVLSRELKEPPQGAHFLSRSL | | |
| | DDALKLTEQPELANKVDMVWIVGGSSVIKEAMN | | |
| | HPGHLKLFVTRIMQDFESDTFFPEIDLEKYKLLPEY | | |
| | PGVLSDVQEEKGIKYKFEVYEKND* | | |
| OT-CD19-014 (OT- | MALPVTALLLPLALLLHAARPSGVGSLNCIVAVSQ | 1344 | 4663; |
| CD19N-014)(CD8a | NMGIGKNGDLPWPPLRNEFRYFQRMTTTSSVEGK | | 4664 |
| leader; linker(SG); | QNLVIMGKKTWFSIPEKNRPLKGRINLVLSRELKE | | |
| hDHFR(Amino acid 2- | PPQGAHFLSRSLDDALKLTEQPELANKVDMVWIV | | |
| 187 of WT)(Y122I, | GGSSVIKEFMNHPGHLKLFVTRIMQDFESDTFFPEI | | |
| A125F); furin site | DLEKYKLLPEYPGVLSDVQEEKGIKYKFEVYEKN | | |
| (ESRRVRRNKRSK | DESRRVRRNKRSKDIQMTQTTSSLSASLGDRVTIS | | |
| (SEQ ID NO: 2734)); | CRASQDISKYLNWYQQKPDGTVKLLIYHTSRLHS | | |
| CD19 scFV; CD8a | GVPSRFSGSGSGTDYSLTISNLEQEDIATYFCQQGN | | |
| hinge + TM; 41BB; | TLPYTFGGGTKLEITGGGGSGGGGSGGGGSEVKL | | |
| CD3zeta; stop) | QESGPGLVAPSQSLSVTCTVSGVSLPDYGVSWIRQ | | |
| | PPRKGLEWLGVIWGSETTYYNSALKSRLTIIKDNS | | |
| | KSQVFLKMNSLQTDDTAIYYCAKHYYYGGSYAM | | |
| | DYWGQGTSVTVSSTTTPAPRPPTPAPTIASQPLSLR | | |
| | PEACRPAAGGAVHTRGLDFACDIYIWAPLAGTCG | | |
| | VLLLSLVITLYCKRGRKKLLYIFKQPFMRPVQTTQ | | |
| | EEDGCSCRFPEEEEGGCELRVKFSRSADAPAYKQ | | |
| | GQNQLYNELNLGRREEYDVLDKRRGRDPEMGGK | | |
| | PRRKNPQEGLYNELQKDKMAEAYSEIGMKGERR | | |
| | RGKGHDGLYQGLSTATKDTYDALHMQALPPR* | | |
| OT-CD19-015 (OT- | MALPVTALLLPLALLLHAARPSGVGSLNCIVAVSQ | 1345 | 4665; |
| CD19N-015)(CD8a | NMGIGKNGDLPWPPLRNEFRYFKRMTTTSSVEGK | | 4666 |
| leader; linker(SG); | QNLVIMGKKTWFSIPEKNRPLKGRINLVLSRELKE | | |
| hDHFR(Amino acid 2- | PPQGAHFLSRSLDDALKLTEQPELANKVDMVWIV | | |
| 187 of WT)(Q36K, | GGSSVIKEAMNHPGHLKLFVTRIMQDFESDTFFPEI | | |
| Y122I); furin site | DLEKYKLLPEYPGVLSDVQEEKGIKYKFEVYEKN | | |
| (ESRRVRRNKRSK | DESRRVRRNKRSKDIQMTQTTSSLSASLGDRVTIS | | |
| (SEQ ID NO: 2734)); | CRASQDISKYLNWYQQKPDGTVKLLIYHTSRLHS | | |
| CD19 scFV; CD8a | GVPSRFSGSGSGTDYSLTISNLEQEDIATYFCQQGN | | |
| hinge + TM; 41BB; | TLPYTFGGGTKLEITGGGGSGGGGSGGGGSEVKL | | |
| CD3zeta; stop) | QESGPGLVAPSQSLSVTCTVSGVSLPDYGVSWIRQ | | |
| | PPRKGLEWLGVIWGSETTYYNSALKSRLTIIKDNS | | |
| | KSQVFLKMNSLQTDDTAIYYCAKHYYYGGSYAM | | |
| | DYWGQGTSVTVSSTTTPAPRPPTPAPTIASQPLSLR | | |
| | PEACRPAAGGAVHTRGLDFACDIYIWAPLAGTCG | | |
| | VLLLSLVITLYCKRGRKKLLYIFKQPFMRPVQTTQ | | |
| | EEDGCSCRFPEEEEGGCELRVKFSRSADAPAYKQ | | |
| | GQNQLYNELNLGRREEYDVLDKRRGRDPEMGGK | | |
| | PRRKNPQEGLYNELQKDKMAEAYSEIGMKGERR | | |
| | RGKGHDGLYQGLSTATKDTYDALHMQALPPR* | | |

[0515] Constructs disclosed in Table 11, which are transcriptionally controlled by a CMV promoter, in some instances may be placed under the transcriptional control of a different promoter to test the role of promoters in CD19 CAR expression. In one embodiment, the CMV promoter may be replaced by an EF1a promoter. In another embodiment, the CMV promoter of the CD19 CAR, OT-CD19C-008 construct, may be replaced to generate OT-CD19C-024 construct, with a EF1a promoter. In another embodiment, the CMV promoter of the CD19 CAR, OT-CD19C-009 construct, may be replaced to generate OT-CD19C-025 construct, with a EF1a promoter.

[0516] In some embodiments, the extracellular targeting domain is joined through the hinge (also called space domain or spacer) and transmembrane regions to an intracellular signaling domain. The hinge connects the extracellular targeting domain to the transmembrane domain which transverses the cell membrane and connects to the intracellular signaling domain. The hinge may need to be varied to optimize the potency of CAR transformed cells toward cancer cells due to the size of the target protein where the targeting moiety binds, and the size and affinity of the targeting domain itself. Upon recognition and binding of the targeting moiety to the target cell, the intracellular signaling domain leads to an activation signal to the CAR T cell, which is further amplified by the “second signal” from one or more intracellular costimulatory domains. The CAR T cell, once activated, can destroy the target cell.

[0517] In some embodiments, the CAR of the present invention may be split into two parts, each part is linked a dimerizing domain, such that an input that triggers the dimerization promotes assembly of the intact functional receptor. Wu and Lim recently reported a split CAR in which the extracellular CD19 binding domain and the intracellular signaling element are separated and linked to the FKBP domain and the FRB* (T2089L mutant of FKBP-rapamycin binding) domain that heterodimerize in the presence of the rapamycin analog AP21967. The split receptor is assembled in the presence of AP21967 and together with the specific antigen binding, activates T cells (Wu et al., Science, 2015, 625(6258): aab4077).

[0518] In some embodiments, the CAR of the present invention may be designed as an inducible CAR. Sakemura et al recently reported the incorporation of a Tet-On inducible system to the CD19 CAR construct. The CD19 CAR is activated only in the presence of doxycycline (Dox). Sakemura reported that Tet-CD19CAR T cells in the presence of Dox were equivalently cytotoxic against CD19⁺ cell lines and had equivalent cytokine production and proliferation upon CD19 stimulation, compared with conventional CD19CAR T cells (Sakemura et al., Cancer Immuno. Res., 2016, Jun. 21, Epub ahead of print). In one example, this Tet-CAR may be the payload of the effector module under the control of SREs (e.g., DDs) of the invention. The dual systems provide more flexibility to turn-on and off of the CAR expression in transduced T cells.

[0519] According to the present invention, the payload of the present invention may be a first-generation CAR, or a second-generation CAR, or a third-generation CAR, or a fourth-generation CAR. Representative effector module embodiments comprising CAR constructs are illustrated in FIG. 13-FIG. 18. In some embodiments, the payload of the present invention may be a full CAR construct composed of the extracellular domain, the hinge and transmembrane domain and the intracellular signaling region. In other embodiments, the payload of the present invention may be a component of the full CAR construct including an extracellular targeting moiety, a hinge region, a transmembrane domain, an intracellular signaling domain, one or more co-stimulatory domain, and other additional elements that improve CAR architecture and functionality including but not limited to a leader sequence, a homing element and a safety switch, or the combination of such components.

[0520] CARs regulated by biocircuits and compositions of the present invention are tunable and thereby offer several advantages. The reversible on-off switch mechanism allows management of acute toxicity caused by excessive CAR-T cell expansion. Pulsatile CAR expression using SREs of the present invention may be achieved by cycling ligand level. The ligand conferred regulation of the CAR may be effective in offsetting tumor escape induced by antigen loss, avoiding functional exhaustion caused by tonic signaling due to chronic antigen exposure and improving the persistence of CAR expressing cells in vivo.

[0521] In some embodiments, biocircuits and compositions of the invention may be utilized to down regulate CAR expression to limit on target on tissue toxicity caused by tumor lysis syndrome. Down regulating the expression of the CARs of the present invention following anti-tumor efficacy may prevent (1) On target off tumor toxicity caused by antigen expression in normal tissue, (2) antigen independent activation in vivo.

[0522] In one embodiment, selection of a CAR with a lower affinity may provide more T cell signaling and less toxicity.

### Extracellular Targeting Domain Moiety

[0523] In accordance with the invention, the extracellular target moiety of a CAR may be any agent that recognizes and binds to a given target molecule, for example, a neoantigen on tumor cells, with high specificity and affinity. The target moiety may be an antibody and variants thereof that specifically binds to a target molecule on tumor cells, or a peptide aptamer selected from a random sequence pool based on its ability to bind to the target molecule on tumor cells, or a variant or fragment thereof that can bind to the target molecule on tumor cells, or an antigen recognition domain from native T-cell receptor (TCR) (e.g. CD4 extracellular domain to recognize HIV infected cells), or exotic recognition components such as a linked cytokine that leads to recognition of target cells bearing the cytokine receptor, or a natural ligand of a receptor.

[0524] In some embodiments, natural ligands may be used as the targeting moieties of the CARs of the present invention. Such natural ligands may be capable of binding to the antigens with affinity in the range of the scFvs and can redirect T cells specificity and effector functions to target cells expressing the complementary receptor. In some embodiments, the targeting moiety of the CAR may be neuregulin-1 (NRG1) which is a natural ligand for HER3 and HER4; VEGF which is a natural ligand of VEGFR; IL13 wildtype protein or IL13 mutein e.g. E13Y which binds to IL13Ra2; NKG2D ligand, which is a natural ligand of NKG2D receptor; CD70 which is ligand of CD27; and a proliferation-inducing ligand (APRIL) which is a natural high affinity ligand for BCMA8 and transmembrane activator and CAML interactor (TACI). Any of the ligand based BCMA CARs taught in the US Patent Publication No. US20160362467A1, the contents of which are incorporated by reference in their entirety.

[0525] In one embodiment, the targeting moiety of the CAR may recognize antigen such as, but not limited to a ganglioside, a growth factor receptor, a lectin or any other cell surface antigen. In some embodiments, any of the sequences described in Table 10 or Table 11 may be useful in the present invention.

[0526] In some embodiments, the targeting domain of a CAR may be a Ig NAR, a Fab fragment, a Fab′ fragment, a F(ab)′2 fragment, a F(ab)′3 fragment, Fv, a single chain variable fragment (scFv), a bis-scFv, a (scFv)2, a minibody, a diabody, a triabody, a tetrabody, a disulfide stabilized Fv protein (dsFv), a unibody, a nanobody, or an antigen binding region derived from an antibody that specifically recognizes a target molecule, for example a tumor specific antigen (TSA). In one embodiment, the targeting moiety is a scFv antibody. The scFv domain, when it is expressed on the surface of a CAR T cell and subsequently binds to a target protein on a cancer cell, is able to maintain the CAR T cell in proximity to the cancer cell and to trigger the activation of the T cell. A scFv can be generated using routine recombinant DNA technology techniques and is discussed in the present invention.

[0527] In one embodiment, the targeting moiety of the CAR may recognize CD19. CD19 is a well-known B cell surface molecule, which upon B cell receptor activation enhances B-cell antigen receptor induced signaling and expansion of B cell populations. CD19 is broadly expressed in both normal and neoplastic B cells. Malignancies derived from B cells such as chronic lymphocytic leukemia, acute lymphocytic leukemia and many non-Hodgkin lymphomas frequently retain CD19 expression. This near universal expression and specificity for a single cell lineage has made CD19 an attractive target for immunotherapies. Human CD19 has 14 exons wherein exon 1-4 encode the extracellular portion of the CD19, exon 5 encodes the transmembrane portion of CD19 and exons 6-14 encode the cytoplasmic tail. In one embodiment, the targeting moiety may comprise scFvs derived from the variable regions of the FMC63 antibody. FMC63 is an IgG2a mouse monoclonal antibody clone specific to the CD19 antigen that reacts with CD19 antigen on cells of the B lineage. The epitope of CD19 recognized by the FMC63 antibody is in exon 2 (Sotillo et al (2015) Cancer Discov; 5(12):1282-95; the contents of which are incorporated by reference in their entirety). In some embodiments, the targeting moiety of the CAR may be derived from the variable regions of other CD19 monoclonal antibody clones including but not limited to 4G7, SJ25C1, CVID3/429, CVID3/155, HIB19, and J3-119.

[0528] In some embodiments, the targeting moiety of a CAR may recognize a tumor specific antigen (TSA), for example a cancer neoantigen that is only expressed by tumor cells because of genetic mutations or alterations in transcription which alter protein coding sequences, therefore creating novel, foreign antigens. The genetic changes result from genetic substitution, insertion, deletion or any other genetic changes of a native cognate protein (i.e. a molecule that is expressed in normal cells). In the context of CD19, TSAs may include a transcript variant of human CD19 lacking exon 2 or lacking exon 5-6 or both (see International patent publication No. WO2016061368; the contents of which are incorporated herein by reference in their entirety). Since FMC63 binding epitope is in exon 2, CD19 lacking exon 2 is not recognized by FMC63 antibody. Thus, in some embodiments, the targeting moiety of the CAR may be an FMC63-distinct scFV. As used herein “FMC63-distinct” refers, to an antibody, scFv or a fragment thereof that is immunologically specific and binds to an epitope of the CD19 antigen that is different or unlike the epitope of CD19 antigen that is bound by FMC63. In some instances, targeting moiety may recognize a CD19 antigen lacking exon2. In one embodiment, the targeting moiety recognizes a fragment of CD19 encoded by exon 1, 3 and/or 4. In one example, the targeting moiety recognizes the epitope that bridges the portion of CD19 encoded by exon 1 and the portion of CD19 encoded by exon 3.

[0529] In some embodiments, the targeting moieties of the present invention may be scFv comprising the amino acid sequences in Table 12.

TABLE 12
scFv sequences

| | | SEQ | |
|---|---|---|---|
| | | ID | |
| Target | Description | NO | Source |
| CD19 | scFv | 4667 | SEQ ID NO. 53 in EP3083671A1 |
| CD19 | scFv | 4668 | SEQ ID NO. 54 in EP3083671A1 |
| CD19 | scFv | 4669 | SEQ ID NO. 1 in WO2015157252 |
| CD19 | scFv | 4670 | SEQ ID NO. 10 in WO2015157252 |
| CD19 | scFv | 4671 | SEQ ID NO. 10 in WO2016033570 |
| CD19 | scFv | 4672 | SEQ ID NO. 11 in WO2015157252 |
| CD19 | scFv | 4673 | SEQ ID NO. 12 in WO2015157252 |
| CD19 | scFv | 4674 | SEQ ID NO. 2 in WO2015157252 |
| CD19 | scFv | 4675 | SEQ ID NO. 2 in WO2016033570 |
| CD19 | scFv | 4676 | SEQ ID NO. 206 in WO2016033570 |
| CD19 | scFv | 4677 | SEQ ID NO. 207 in WO2016033570 |
| CD19 | scFv | 4678 | SEQ ID NO. 208 in WO2016033570 |
| CD19 | scFv | 4679 | SEQ ID NO. 209 in WO2016033570 |
| CD19 | scFv | 4680 | SEQ ID NO. 210 in WO2016033570 |
| CD19 | scFv | 4681 | SEQ ID NO. 211 in WO2016033570 |
| CD19 | scFv | 4682 | SEQ ID NO. 213 in WO2016033570 |
| CD19 | scFv | 4683 | SEQ ID NO. 214 in WO2016033570 |
| CD19 | scFv | 4684 | SEQ ID NO. 215 in WO2016033570 |
| CD19 | scFv | 4685 | SEQ ID NO. 216 in WO2016033570 |
| CD19 | scFv | 4686 | SEQ ID NO. 217 in WO2016033570 |
| CD19 | scFv | 4687 | SEQ ID NO. 218 in WO2016033570 |
| CD19 | scFv | 4688 | SEQ ID NO. 219 in WO2016033570 |
| CD19 | scFv | 4689 | SEQ ID NO. 220 in WO2016033570 |
| CD19 | scFv | 4690 | SEQ ID NO. 221 in WO2016033570 |
| CD19 | scFv | 4691 | SEQ ID NO. 222 in WO2016033570 |
| CD19 | scFv | 4692 | SEQ ID NO. 223 in W02016033570 |
| CD19 | scFv | 4693 | SEQ ID NO. 224 in WO2016033570 |
| CD19 | scFv | 4694 | SEQ ID NO. 225 in WO2016033570 |
| CD19 | scFv | 4695 | SEQ ID NO. 3 in WO2015157252 |
| CD19 | scFv | 4696 | SEQ ID NO. 4 in WO2015157252 |
| CD19 | scFv | 4697 | SEQ ID NO. 4 in WO2016033570 |
| CD19 | scFv | 4698 | SEQ ID NO. 45 in WO2016033570 |
| CD19 | scFv | 4699 | SEQ ID NO. 47 in WO2016033570 |
| CD19 | scFv | 4700 | SEQ ID NO. 49 in WO2016033570 |
| CD19 | scFv | 4701 | SEQ ID NO. 5 in WO2015155341A1 |
| CD19 | scFv | 4702 | SEQ ID NO. 5 in WO2015157252 |
| CD19 | scFv | 4703 | SEQ ID NO. 51 in WO2016033570 |
| CD19 | scFv | 4704 | SEQ ID NO. 53 in WO2016033570 |
| CD19 | scFv | 4705 | SEQ ID NO. 55 in WO2016033570 |
| CD19 | scFv | 4706 | SEQ ID NO. 57 in WO2016033570 |
| CD19 | scFv | 4707 | SEQ ID NO. 59 in WO2015157252 |
| CD19 | scFv | 4708 | SEQ ID NO. 59 in WO2016033570 |
| CD19 | scFv | 4709 | SEQ ID NO. 6 in WO2015157252 |
| CD19 | scFv | 4710 | SEQ ID NO. 6 in WO2016033570 |
| CD19 | scFv | 4711 | SEQ ID NO. 7 in WO2014184143 |
| CD19 | scFv | 4712 | SEQ ID NO. 7 in WO2015157252 |
| CD19 | scFv | 4713 | SEQ ID NO. 8 in WO2015157252 |
| CD19 | scFv | 4714 | SEQ ID NO. 8 in WO2016033570 |
| CD19 | scFv | 4715 | SEQ ID NO. 87 in WO2016033570 |
| CD19 | scFv | 4716 | SEQ ID NO. 9 in WO2015157252 |
| CD19 | scFv | 4717 | SEQ ID NO. 9 in WO2016139487 |
| CD19 | scFv | 4718 | SEQ ID NO. 10 in US20160152723 |
| CD19 | scFv | 4719 | SEQ ID NO. 2 in US20160152723 |
| CD19 | scFv | 4720 | SEQ ID NO. 206 in US20160152723 |
| CD19 | scFv | 4721 | SEQ ID NO. 207 in US20160152723 |
| CD19 | scFv | 4722 | SEQ ID NO. 208 in US20160152723 |
| CD19 | scFv | 4723 | SEQ ID NO. 209 in US20160152723 |
| CD19 | scFv | 4724 | SEQ ID NO. 210 in US20160152723 |
| CD19 | scFv | 4725 | SEQ ID NO. 211 in US20160152723 |
| CD19 | scFv | 4726 | SEQ ID NO. 212 in US20160152723 |
| CD19 | scFv | 4727 | SEQ ID NO. 213 in US20160152723 |
| CD19 | scFv | 4728 | SEQ ID NO. 214 in US20160152723 |
| CD19 | scFv | 4729 | SEQ ID NO. 215 in US20160152723 |
| CD19 | scFv | 4730 | SEQ ID NO. 216 in US20160152723 |
| CD19 | scFv | 4731 | SEQ ID NO. 217 in US20160152723 |
| CD19 | scFv | 4732 | SEQ ID NO. 218 in US20160152723 |
| CD19 | scFv | 4733 | SEQ ID NO. 219 in US20160152723 |
| CD19 | scFv | 4734 | SEQ ID NO. 220 in US20160152723 |
| CD19 | scFv | 4735 | SEQ ID NO. 221 in US20160152723 |
| CD19 | scFv | 4736 | SEQ ID NO. 222 in US20160152723 |
| CD19 | scFv | 4737 | SEQ ID NO. 223 in US20160152723 |
| CD19 | scFv | 4738 | SEQ ID NO. 224 in US20160152723 |
| CD19 | scFv | 4739 | SEQ ID NO. 225 in US20160152723 |
| CD19 | scFv | 4740 | SEQ ID NO. 32 in EP3083691A2 |
| CD19 | scFv | 4741 | SEQ ID NO. 35 in EP3083691A2 |
| CD19 | scFv | 4742 | SEQ ID NO. 38 in EP3083691A2 |
| CD19 | scFv | 4743 | SEQ ID NO. 4 in US20160152723 |
| CD19 | scFv | 4744 | SEQ ID NO. 45 in US20160152723 |
| CD19 | scFv | 4745 | SEQ ID NO. 47 in US20160152723 |
| CD19 | scFv | 4746 | SEQ ID NO. 49 in US20160152723 |
| CD19 | scFv | 4747 | SEQ ID NO. 51 in US20160152723 |
| CD19 | scFv | 4748 | SEQ ID NO. 53 in US20160152723 |
| CD19 | scFv | 4749 | SEQ ID NO. 55 in US20160152723 |
| CD19 | scFv | 4750 | SEQ ID NO. 57 in US20160152723 |
| CD19 | scFv | 4751 | SEQ ID NO. 59 in US20160152723 |
| CD19 | scFv | 4752 | SEQ ID NO. 6 in US20160152723 |
| CD19 | scFv | 4753 | SEQ ID NO. 8 in US20160152723 |
| CD19 | scFv | 4754 | SEQ ID NO. 87 in US20160152723 |
| CD19 | scFv | 4755 | SEQ ID NO. 89 in US20160152723 |
| CD19 | scFv | 4756 | SEQ ID NO. 39 in WO2016109410 |
| CD19 | scFv | 4757 | SEQ ID NO. 37 in EP3083671A1 |
| CD19 | scFv | 4758 | SEQ ID NO. 174 in WO2016115482 |
| CD19 | scFv | 4759 | SEQ ID NO. 20 in WO2012079000 |
| CD19 | scFv | 4760 | SEQ ID NO. 32 in WO2015092024 |
| CD19 | scFv | 4761 | SEQ ID NO. 33 in WO2015092024A2 |
| CD19 | scFv | 4762 | SEQ ID NO. 35 in WO2015092024A2 |
| CD19 | scFv | 4763 | SEQ ID NO. 38 in WO2015092024A2 |
| CD19 | scFv | 4764 | SEQ ID NO. 40 in WO2016109410 |
| CD19 | scFv | 4765 | SEQ ID NO. 41 in WO2016109410 |
| CD19 | scFv | 4766 | SEQ ID NO. 42 in WO2016109410 |
| CD19 | scFv | 4767 | SEQ ID NO. 43 in WO2016109410 |
| CD19 | scFv | 4768 | SEQ ID NO. 44 in WO2016109410 |
| CD19 | scFv | 4769 | SEQ ID NO. 45 in WO2016109410 |
| CD19 | scFv | 4770 | SEQ ID NO. 46 in WO2016109410 |
| CD19 | scFv | 4771 | SEQ ID NO. 47 in WO2016109410 |
| CD19 | scFv | 4772 | SEQ ID NO. 48 in WO2016109410 |
| CD19 | scFv | 4773 | SEQ ID NO. 49 in WO2016109410 |
| CD19 | scFv | 4774 | SEQ ID NO. 5 in WO2015155341A1 |
| CD19 | scFv | 4775 | SEQ ID NO. 50 in WO2016109410 |
| CD19 | scFv | 4776 | SEQ ID NO. 51 in WO2016109410 |
| CD19 | scFv | 4777 | SEQ ID NO. 7 in US20160145337A1 |
| CD19 | scFv | 4778 | SEQ ID NO. 9 in US20160145337A1 |
| CD19 | scFv | 4779 | SEQ ID NO. 20 in U.S. Pat. No. |
| | | | 9,499,629B2 |
| CD19 | scFv | 4780 | SEQ ID NO. 6 in WO2015155341A1 |
| CD19 | scFv | 4781 | SEQ ID NO. 73 in WO2016164580 |
| CD19 | scFv | 4782 | SEQ ID NO. 10 US20160152723 |
| CD19 | scFv | 4783 | SEQ ID NO. 2 in US20160152723 |
| CD19 | scFv | 4784 | SEQ ID NO. 206 in US20160152723 |
| CD19 | scFv | 4785 | SEQ ID NO. 207 in US20160152723 |
| CD19 | scFv | 4786 | SEQ ID NO. 209 in US20160152723 |
| CD19 | scFv | 4787 | SEQ ID NO. 210 in US20160152723 |
| CD19 | scFv | 4788 | SEQ ID NO. 212 in US20160152723 |
| CD19 | scFv | 4789 | SEQ ID NO. 216 in US20160152723 |
| CD19 | scFv | 4790 | SEQ ID NO. 218 in US20160152723 |
| CD19 | scFv | 4791 | SEQ ID NO. 219 in US20160152723 |
| CD19 | scFv | 4792 | SEQ ID NO. 220 in US20160152723 |
| CD19 | scFv | 4793 | SEQ ID NO. 221 in US20160152723 |
| CD19 | scFv | 4794 | SEQ ID NO. 222 in US20160152723 |
| CD19 | scFv | 4795 | SEQ ID NO. 223 in US20160152723 |
| CD19 | scFv | 4796 | SEQ ID NO. 224 in US20160152723 |
| CD19 | scFv | 4797 | SEQ ID NO. 225 in US20160152723 |
| CD19 | scFv | 4798 | SEQ ID NO. 4 in US20160152723 |
| CD19 | scFv | 4799 | SEQ ID NO. 45 in US20160152723 |
| CD19 | scFv | 4800 | SEQ ID NO. 47 in US20160152723 |
| CD19 | scFv | 4801 | SEQ ID NO. 49 in US20160152723 |
| CD19 | scFv | 4802 | SEQ ID NO. 51 in US20160152723 |
| CD19 | scFv | 4803 | SEQ ID NO. 53 in US20160152723 |
| CD19 | scFv | 4804 | SEQ ID NO. 55 in US20160152723 |
| CD19 | scFv | 4805 | SEQ ID NO. 57 in US20160152723 |
| CD19 | scFv | 4806 | SEQ ID NO. 59 in US20160152723 |
| CD19 | scFv | 4807 | SEQ ID NO. 6 in US20160152723 |
| CD19 | scFv | 4808 | SEQ ID NO. 8 in US20160152723 |
| CD19 | scFv | 4809 | SEQ ID NO. 87 in US20160152723 |
| CD19 | scFv | 4810 | SEQ ID NO. 89 in US20160152723 |
| CD19 | scFv | 4811 | SEQ ID NO. 5 in WO2016055551 |

[0530] In some embodiments, the targeting moieties of the present invention may be scFv comprising the amino acid sequences in Table 13.

TABLE 13
scFv sequences

| | | | SEQ |
|---|---|---|---|
| | | | ID |
| Target | Description and Clone name | Source | NO. |
| ALK | ALK15 scFv | SEQ ID NO. 17 in WO2015069922 | 4812 |
| ALK | ALK48 scFv | SEQ ID NO. 18 in WO2015069922 | 4813 |
| ALK | ALK53 scFv | SEQ ID NO. 19 in WO2015069922 | 4814 |
| ALK | ALK58 scFv | SEQ ID NO. 20 in WO2015069922 | 4815 |
| ALK | humanized ALK15 scFv | SEQ ID NO. 21 in WO2015069922 | 4816 |
| ALK | humanized ALK48 scFv | SEQ ID NO. 22 in WO2015069922 | 4817 |
| ALK | humanized ALK53 scFv | SEQ ID NO. 23 in WO2015069922 | 4818 |
| ALK | humanized ALK58 scFv | SEQ ID NO. 24 in WO2015069922 | 4819 |
| CD22 | CD22 (m971) scFv | SEQ ID NO. 9 in WO2014065961 | 4820 |
| CD22 | CD22 (HA22 or BL22) scFv | SEQ ID NO. 5 in WO2013059593 | 4821 |
| CD22 | CD22 (HA22 or BL22) scFv | SEQ ID NO. 6 in WO2013059593 | 4822 |
| CD276 | CD276 scFv | SEQ ID NO. 21 in WO2017044699 | 4823 |
| CD276 | CD276 scFv (CD276.6) | SEQ ID NO. 10 in WO2014160627 | 4824 |
| CD276 | CD276 scFv (CD276.1) | SEQ ID NO. 19 in WO2014160627 | 4825 |
| CD276 | CD276 scFv (CD276.17) | SEQ ID NO. 28 in WO2014160627 | 4826 |
| GD2 | hu3F8/huOKT3 scFv | SEQ ID No. 23 in WO2011160119 | 4827 |
| GD2 | hu3F8/C8.2.5 scFv | SEQ ID No. 24 in WO2011160119 | 4828 |
| Gangliosides | DMab14-86184 scFv | SEQ ID No. 6 in WO2012071216 | 4829 |
| including GD2 | | | |
| Gangliosides | GMab1 scFv | SEQ ID No. 20 in WO2012071216 | 4830 |
| including GD2 | | | |
| Gangliosides | GMab2 scFV | SEQ ID No. 21 in WO2012071216 | 4831 |
| including GD2 | | | |
| Gangliosides | DMab14 scFV | SEQ ID No. 22 in WO2012071216 | 4832 |
| including GD2 | | | |
| GD2 | GD2 scFv | SEQ ID NO. 19 in WO2016134286 | 4833 |
| GD2 | GD2 scFv | SEQ ID NO. 20 in WO2016134287 | 4834 |
| GD2 | GD2 scFv | SEQ ID NO. 21 in WO2016134288 | 4835 |
| GD2 | Murine KM666 sequence | SEQ ID NO. 7 in WO2015132604 | 4836 |
| GD2 | Humanized KM666 sequence | SEQ ID NO. 8 in WO2015132604 | 4837 |
| GD2 | GD2 scFv | SEQ ID NO. 11 in US20160032009 | 4838 |
| GD2 | GD2 scFv | SEQ ID NO. 12 in US20160032009 | 4839 |
| GD2 | GD2 scFv | SEQ ID NO. 13 in US20160032009 | 4840 |
| GD2 | GD2 scFv | SEQ ID NO. 14 in US20160032009 | 4841 |
| GD2 | GD2 scFv | SEQ ID NO. 15 in US20160032009 | 4842 |
| GD2 | GD2 scFv | SEQ ID NO. 16 in US20160032009 | 4843 |
| GD2 | GD2 scFv | SEQ ID NO. 17 in US20160032009 | 4844 |
| GD2 | GD2 scFv | SEQ ID NO. 18 in US20160032009 | 4845 |
| GD2 | GD2 scFv | SEQ ID NO. 19 in US20160032009 | 4846 |
| GD2 | GD2 scFv | SEQ ID NO. 20 in US20160032009 | 4847 |
| GD2 | GD2 scFv | SEQ ID NO. 21 in US20160032009 | 4848 |
| GD2 | GD2 scFv | SEQ ID NO. 22 in US20160032009 | 4849 |
| GD2 | GD2 scFv | SEQ ID NO. 23 in US20160032009 | 4850 |
| GD2 | GD2 scFv | SEQ ID NO. 24 in US20160032009 | 4851 |
| GD2 | GD2 scFv | SEQ ID NO. 25 in US20160032009 | 4852 |
| GD2 | Murine KM666 scFv sequence | SEQ ID NO. 7 in US20170066838 | 4853 |
| GD2 | Humanized KM666 scFv sequence | SEQ ID NO. 8 in US20170066838 | 4854 |
| GD2 | GD2 (clone 1A7) scFv | SEQ ID NO. 1 in US 20050287148A1 | 4855 |
| Her2 | F5 | SEQ ID NO. 1 in U.S. Pat. No. 9,388,244 | 4856 |
| Her2 | C1 | SEQ ID NO. 2 in U.S. Pat. No. 9,388,244 | 4857 |
| anti-Her2/neu- | anti-Her2/neu-anti-CD3 | SEQ ID NO. 1 in WO2014079000A1 | 4858 |
| anti-CD3 | bispecific antibody scFv | | |
| Her2 | F5 | SEQ ID NO. 1 in U.S. Pat. No. 7,332,580 | 4859 |
| Her2 | HER3.B12 | SEQ ID NO. 6 in U.S. Pat. No. 7,332,580 | 4860 |
| Her2 | FL/Fc/HER2Fv-Flt3 ligand | SEQ ID NO. 62 in US20040254108 | 4861 |
| | extracellular region (hFLex); IgG1 | | |
| | Fc; rhuMAb ScFv | | |
| Her2 | Periplasmic 6 × -His (SEQ ID NO. | SEQ ID NO. 26 in U.S. Pat. No. 7,632,924 | 4862 |
| | 3091) C terminal scFv-4D5 | | |
| Her2 | Periplasmic 6 × -His (SEQ ID NO. | SEQ ID NO. 28 in U.S. Pat. No. 7,632,924 | 4863 |
| | 3091) N terminal scFv-4D5 | | |

### Intracellular Signaling Domains

[0531] The intracellular domain of a CAR fusion polypeptide, after binding to its target molecule, transmits a signal to the immune effector cell, activating at least one of the normal effector functions of immune effector cells, including cytolytic activity (e.g., cytokine secretion) or helper activity. Therefore, the intracellular domain comprises an “intracellular signaling domain” of a T cell receptor (TCR).

[0532] In some aspects, the entire intracellular signaling domain can be employed. In other aspects, a truncated portion of the intracellular signaling domain may be used in place of the intact chain as long as it transduces the effector function signal.

[0533] In some aspects, the entire intracellular signaling domain can be employed. In other aspects, a truncated portion of the intracellular signaling domain may be used in place of the intact chain if it transduces the effector function signal.

[0534] In some embodiments, the intracellular signaling domain of the present invention may contain signaling motifs which are known as immunoreceptor tyrosine-based activation motifs (ITAMs). Examples of ITAM containing cytoplasmic signaling sequences include those derived from TCR CD3zeta, FcR gamma, FcR beta, CD3 gamma, CD3 delta, CD3 epsilon, CD5, CD22, CD79a, CD79b, and CD66d. In one example, the intracellular signaling domain is a CD3 zeta (CD3ζ) signaling domain.

[0535] In some embodiments, the intracellular region of the present invention further comprises one or more costimulatory signaling domains which provide additional signals to the immune effector cells. These costimulatory signaling domains, in combination with the signaling domain can further improve expansion, activation, memory, persistence, and tumor-eradicating efficiency of CAR engineered immune cells (e.g., CAR T cells). In some cases, the costimulatory signaling region contains 1, 2, 3, or 4 cytoplasmic domains of one or more intracellular signaling and/or costimulatory molecules. The costimulatory signaling domain may be the intracellular/cytoplasmic domain of a costimulatory molecule, including but not limited to CD2, CD7, CD27, CD28, 4-1BB (CD137), OX40 (CD134), CD30, CD40, ICOS (CD278), GITR (glucocorticoid-induced tumor necrosis factor receptor), LFA-1 (lymphocyte function-associated antigen-1), LIGHT, NKG2C, B7-H3. In one example, the costimulatory signaling domain is derived from the cytoplasmic domain of CD28. In another example, the costimulatory signaling domain is derived from the cytoplasmic domain of 4-1BB (CD137). In another example, the co-stimulatory signaling domain may be an intracellular domain of GITR as taught in U.S. Pat. No. 9,175,308; the contents of which are incorporated herein by reference in its entirety.

[0536] In some embodiments, the intracellular region of the present invention may comprise a functional signaling domain from a protein selected from the group consisting of an MHC class I molecule, a TNF receptor protein, an immunoglobulin-like protein, a cytokine receptor, an integrin, a signaling lymphocytic activation protein (SLAM) such as CD48, CD229, 2B4, CD84, NTB-A, CRACC, BLAME, CD2F-10, SLAMF6, SLAMF7, an activating NK cell receptor, BTLA, a Toll ligand receptor, OX40, CD2, CD7, CD27, CD28, CD30, CD40, CDS, ICAM-1, LFA-1 (CD11a/CD18), 4-1BB (CD137), B7-H3, CDS, ICAM-1, ICOS (CD278), GITR, BAFFR, LIGHT, HVEM (LIGHTR), SLAMF7, NKp80 (KLRF1), NKp44, NKp30, NKp46, CD19, CD4, CD8alpha, CD8beta, IL2R beta, IL2R gamma, IL7R alpha, IL15Ra, ITGA4, VLA1, CD49a, ITGA4, IA4, CD49D, ITGA6, VLA-6, CD49f, ITGAD, CD11 d, ITGAE, CD103, ITGAL, CD11a, LFA-1, ITGAM, CD11b, ITGAX, CD11c, ITGB1, CD29, ITGB2, CD18, LFA-1, ITGB7, NKG2D, NKG2C, NKD2C SLP76, TNFR2, TRANCE/RANKL, DNAM1 (CD226), SLAMF4 (CD244, 2B4), CD84, CD96 (Tactile), CEACAM1, CRTAM, Ly9 (CD229), CD160 (BY55), PSGL1, CD100 (SEMA4D), CD69, SLAMF6 (NTB-A, Ly108), SLAM (SLAMF1, CD150, IPO-3), BLAME (SLAMF8), SELPLG (CD162), LTBR, LAT, CD270 (HVEM), GADS, SLP-76, PAG/Cbp, CD19a, a ligand that specifically binds with CD83, DAP 10, TRIM, ZAP70, Killer immunoglobulin receptors (KIRs) such as KIR2DL1, KIR2DL2/L3, KIR2DL4, KIR2DL5A, KIR2DL5B, KIR2DS1, KIR2DS2, KIR2DS3, KIR2DS4, KIR2DS5, KIR3DL1/S1, KIR3DL2, KIR3DL3, and KIR2DP1; lectin related NK cell receptors such as Ly49, Ly49A, and Ly49C.

[0537] In some embodiments, the intracellular signaling domain of the present invention may contain signaling domains derived from JAK-STAT. In other embodiments, the intracellular signaling domain of the present invention may contain signaling domains derived from DAP-12 (Death associated protein 12) (Topfer et al., Immunol., 2015, 194: 3201-3212; and Wang et al., Cancer Immunol., 2015, 3: 815-826). DAP-12 is a key signal transduction receptor in NK cells. The activating signals mediated by DAP-12 play important roles in triggering NK cell cytotoxicity responses toward certain tumor cells and virally infected cells. The cytoplasmic domain of DAP12 contains an Immunoreceptor Tyrosine-based Activation Motif (ITAM). Accordingly, a CAR containing a DAP12-derived signaling domain may be used for adoptive transfer of NK cells.

[0538] In some embodiments, T cells engineered with two or more CARs incorporating distinct co-stimulatory domains and regulated by distinct DD may be used to provide kinetic control of downstream signaling.

[0539] In some embodiments, the intracellular domain of the present invention may comprise amino acid sequences of Table 14.

TABLE 14
Intracellular signaling and co-stimulatory domains

| | | Amino |
|---|---|---|
| | | Acid |
| Description | Amino Acid Sequence | SEQ ID |
| 2B4 co-stimulatory | WRRKRKEKQSETSPKEFLTIYEDVKDLKTRRNHEQEQTFP | 421 |
| domain | GGGSTIYSMIQSQSSAPTSQEPAYTLYSLIQPSRKSGSRKRN | |
| | HSPSFNSTIYEVIGKSQPKAQNPARLSRKELENFDVYS | |
| CD27 co-stimulatory | HQRRKYRSNKGESPVEPAEPCRYSCPREEEGSTIPIQEDYR | 422 |
| domain | KPEPACSP | |
| CD272(BTLA1)co- | RRHQGKQNELSDTAGREINLVDAHLKSEQTEASTRQNSQ | 2739 |
| stimulatory domain | VLLSETGIYDNDPDLCFRMQEGSEVYSNPCLEENKPGVYA | |
| | SLNHSVIGPNSRLARNVKEAPTEYASICVRS | |
| CD272(BTLA1)co- | CCLRRHQGKQNELSDTAGREINLVDAHLKSEQTEASTRQ | 424 |
| stimulatory domain | NSQVLLSETGIYDNDPDLCFRMQEGSEVYSNPCLEENKPG | |
| | IVYASLNHSVIGPNSRLARNVKEAPTEYASICVRS | |
| CD28 co-stimulatory | FWVLVVVGGVLACYSLLVTVAFIIFWV | 425 |
| CD28 co-stimulatory | KRGRKKLLYIFKQPFMRPVQTTQEEDGCSCRFPEEEEGGC | 426 |
| domain | EL | |
| CD28 co-stimulatory | FWVRSKRSRLLHSDYMNMTPRRPGPTRKHYQPYAPPRDF | 427 |
| domain | AAYRS | |
| CD28 co-stimulatory | RSKRSRGGHSDYMNMTPRRPGPTRKHYQPYAPPRDFAAY | 428 |
| domain | YRS | |
| CD28 co-stimulatory | RSKRSRGGHSDYIVINMTPRRPGPTRKHYQPYAPPRDFAA | 429 |
| domain | YRS | |
| CD28 co-stimulatory | MLRLLLALNLFPSIQVTGNKILVKQSPMLVAYDNAVNLSC | 430 |
| signaling region | KYSYNLFSREFRASLHKGLDSAVEVCVVYGNYSQQLQVY | |
| | SKTGFNCDGKLGNESVTFYLQNLYVNQTDIYFCKIEVMYP | |
| | PPYLDNEKSNGTIIHVKGKHLCPSPLFPGPSKPFWVLVVVG | |
| | GVLACYSLLVTVAFIIFWVRSKRSRLLHSDYMNMTPRRPG | |
| | PTRKHYQPYAPPRDFAAYRS | |
| CD30 co-stimulatory | RRACRKRIRQKLHLCYPVQTSQPKLELVDSRPRRSSTQLR | 431 |
| domain | SGASVTEPVAEERGLMSQPLMETCHSVGAAYLESLPLQD | |
| | ASPAGGPSSPRDLPEPRVSTEHTNNKIEKIYIMKADTVIVG | |
| | TVKAELPEGRGLAGPAEPELEEELEADHTPHYPEQETEPPL | |
| | GSCSDVMLSVEEEGKEDPLPTAASGK | |
| CD30 co-stimulatory | RRACRKRIRQKLHLCYPVQTSQPKLELVDSRPRRSSTQLR | 432 |
| domain | SGASVTEPVAEERGLMSQPLMETCHSVGAAYLESLPLQD | |
| | ASPAGGPSSPRDLPEPRVSTEHTNNKIEKIYIMKADTVIVG | |
| | TVKAELPEGRGLAGPAEPELEEELEADHTPHYPEQETEPPL | |
| | GSCSDVMLSVEEEGKEDPLPTAASGK | |
| GITR co-stimulatory | HIWQLRSQCMWPRETQLLLEVPPSTEDARSCQFPEEERGE | 433 |
| domain | RSAEEKGRLGDLWV | |
| HVEM co-stimulatory | CVKRRKPRGDVVKVIVSVQRKRQEAEGEATVIEALQAPP | 434 |
| domain | DVTTVAVEETIPSFTGRSPNH | |
| ICOS co-stimulatory | TKKKYSSSVHDPNGEYMFMRAVNTAKKSRLTDVTL | 435 |
| domain | | |
| ICOS co-stimulatory | CWLTKKKYSSSVHDPNGEYMFMRAVNTAKKSRLTDVTL | 436 |
| signaling domain | | |
| LAG-3 co-stimulatory | HLWRRQWRPRRFSALEQGIHPPQAQSKIEELEQEPEPEPEP | 437 |
| region | EPEPEPEPEPEQL | |
| OX40 co-stimulatory | ALYLLRRDQRLPPDAHKPPGGGSFRTPIQEEQADAHSTLA | 438 |
| domain | KI | |
| OX40 co-stimulatory | RRDQRLPPDAHKPPGGGSFRTPIQEEQADAHSTLAKI | 439 |
| domain | | |
| 4-1BB intracellular | KRGRKKLLYIFKQPFMRPVQTIQEEDGCSCRFPEEEEGGCE | 440 |
| domain | L | |
| 4-1BB signaling | KRGRKKLLYIFKQPFMRPVQTTQEEDGCSCRFPEEEEGGY | 441 |
| domain | EL | |
| 4-1BB-CD3Zeta | TGTTTPAPRPPTPAPTIASQPLSLRPEACRPAAGGAVHTRG | 442 |
| intracellular domain | LDFACDIYIWAPLAGTCGVLLLSLVITLYCKRGRKKLLYIF | |
| | KQPFMRPVQTTQEEDGCSCRFPEEEEGGCELRVKFSRSAD | |
| | APAYQQGQNQLYNELNLGRREEYDVLDKRRGRDPEMGG | |
| | KPRRKNPQEGLYNELQKDKMAEAYSEIGMKGERRRGKG | |
| | HDGLYQGLSTATKDTYDALHMQALPPR | |
| 4-1BB-Z endodomain | KRGRKKLLYIFKQPFMRPVQTTQEEDGCSCRFPEEEEGGC | 443 |
| fusion | ELRVKFSRSADAPAYQQGQNQLYNELNLGRREEYDVLDK | |
| | RRGRDPEMGGKPRRKNPQEGLYNELQKDKMAEAYSEIG | |
| | [sequence omitted] | |
| CD127 intracellular | KRIKPIVWPSLPDHKKTLEHLCKKPRKNLNVSFNPESFLDC | 444 |
| domain | QIHRVDDIQARDEVEGFLQDTFPQQLEESEKQRLGGDVQS | |
| | PNCPSEDVVITPESFGRDSSLTCLAGNVSACDAPILSSSRSL | |
| | DCRESGKNGPHVYQDLLLSLGTTNSTLPPPFSLQSGILTLN | |
| | PVAQGQPILTSLGSNQEEAYVTMSSFYQNQ | |
| CD137 intracellular | RFSVVKRGRKKLLYIFKQPFMRPVQTTQEEDGCSCRFPEE | 445 |
| domain | EEGGCEL | |
| CD148 intracellular | RKKRKDAKNNEVSFSQIKPKKSKLIRVENFEAYFKKQQAD | 446 |
| domain | SNCGFAEEYEDLKLVGISQPKYAAELAENRGKNRYNNVL | |
| | PYDISRVKLSVQTHSTDDYINANYMPGYHSKKDFIATQGP | |
| | LPNTLKDFWRMVWEKNVYAIIMLTKCVEQGRTKCEEYW | |
| | PSKQAQDYGDITVAMTSEIVLPEWTIRDFTVKNIQTSESHP | |
| | LRQFHFTSWPDHGVPDTTDLLINFRYLVRDYMKQSPPESPI | |
| | LVHCSAGVGRTGTFIAIDRLIYQIENENTVDVYGIVYDLR | |
| | MHRPLMVQTEDQYVFLNQCVLDIVRSQKDSKVDLIYQNT | |
| | TAMTIYENLAPVTTFGKTNGYIA | |
| CD27 intracellular | QRRKYRSNKGESPVEPAEPCHYSCPREEEGSTIPIQEDYRK | 447 |
| domain | PEPACSP | |
| CD28 intracellular | FAAYRS | 448 |
| domain | | |
| CD28 signaling chain | FWVLVVVGGVLACYSLLVTVAFIIFWVRSKRSRLLHSDY | 449 |
| | MNMTPRRPGPTRKHYQPYAPPRDFAAYRS | |
| CD28 signaling domain | RSKRSRLLHSDYMNMTPRRPGPTRKHYQPYAPPRDFAAY | 450 |
| | RS | |
| CD28 signaling domain | SKRSRLLHSDYMNMTPRRPGPTRKHYQPYAPPRDFAAYR | 451 |
| | S | |
| CD28 singaling domain | IEVMYPPPYLDNEKSNGTIIHVKGKHLCPSPLFPGPSKPFW | 452 |
| | VLVVVGGVLACYSLLVTVAFIIFWRSKRSRLLHSDYMNM | |
| | TPRRPGPTRKHYQPYAPPRDFAAYRS | |
| CD28, 4-1BB, and/or | RSKRSRLLHSDYMNMTPRRPGPTRKHYQPYAPPRDFAAY | 453 |
| CD3ζ signaling domain | RSRFSVVKRGRKKLLYIFKQPFMRPVQTTQEEDGCSCRFP | |
| | EEEEGGCELRVKFSRSADAPAYQQGQNQLYNELNLGRRE | |
| | EYDVLDKRRGRDPEMGGKPRRKNPQEGLYNELQKDKMA | |
| | EAYSEIGMKGERRRGKGHDGLYQGLSTATKDTYDALHM | |
| | QALPPR | |
| CD28/CD3C | AAAIEVMYPPPYLDNEKSNGTIIHVKGKHLCPSPLFPGPSK | 454 |
| | PFWVLVVVGGVLACYSLLVTVAFIIFWVRSKRSRLLHSDY | |
| | MNMTPRRPGPTRKHYQPYAPPRDFAAYRSRVKFSRSADA | |
| | PAYQQGQNQLYNELNLGRREEYDVLDKRRGRDPEMGGK | |
| | PRRKNPQEGLYNELQKDKMAEAYSEIGMKGERRRGKGH | |
| | DGLYQGLSTATKDTYDALHMQALPPR | |
| CD28-0XZ intracellular | RSKRSRLLHSDYNMTPRRPGPTRKHYQPYAPPRDFAAYRS | 455 |
| domain | RDQRLPPDAHKPPGGGSFRTPIQEEQADAHSTLAKIRVKFS | |
| | RSADAPAYQQGQNQLYNELNLGRREEYDVLDKRRGRDP | |
| | EMGGKPRRKNPQEGLYNELQKDKMAEAYSEIGMKGERR | |
| | RGKGHDGLYQGLSTATKDTYDALHMQALPPR | |
| CD28-4-1BB | MFWVLVVVGGVLACYSLLVTVAFIIFWVKRGRKKLLYIF | 456 |
| intracellular domain | KQPFMRPVQTTQEEDGCSCRFPEEEEGGCEL | |
| CD28-4-1BB | IEVMYPPPYLDNEKSNGTIIHVKGKHLCPSPLFPGPSKPFW | 457 |
| intracellular domain | VLVVVGGVLACYSLLVTVAFIIFWVKRGRKKLLYIFKQPF | |
| | MRPVQTTQEEDGCSCRFPEEEEGGCEL | |
| CD28-CD3 Zeta | RSKRSRLLHSDYMNMTPRRPGPTRKHYQPYAPPRDFAAY | 458 |
| intracellular domain | RSRVKFSRSADAPAYQQGQNQLYNELNLGRREEYDVLDK | |
| | RRGRDPEMGGKPRRKNPQEGLYNELQKDKMAEAYSEIG | |
| | [sequence omitted] | |
| CD28-CD3Zeta | KRSRLLHSDYMNMTPRRPGPTRKHYQPYAPPRDFAAYRS | 459 |
| intracellular domain | RVKFSRSADAPAYQQGQNQLYNELNLGRREEYDVLDKR | |
| | RGRDPEMGGKPRRKNPQEGLYNELQKDKMAEAYSEIGM | |
| | KGERRRGKGHDGLYQGLSTATKDTYDALHMQALPPR | |
| CD3 delta chain | MEHSTFLSGLVLATLLSQVSPFKIPIEELEDRVFVNCNTSIT | 460 |
| intracellular signaling | WVEGTVGTLLSDITRLDLGKRILDPRGIYRCNGTDIYKDK | |
| domain | ESTVQVHYRMCQSCVELDPATVAGIIVTDVIATLLLALGV | |
| | FCFAGHETGRLSGAADTQALLRNDQVYQPLRDRDDAQYS | |
| | HLGGNWARNK | |
| CD3 delta chain | MEHSTFLSGLVLATLLSQVSPFKIPIEELEDRVFVNCNTSIT | 461 |
| intracellular signaling | WVEGTVGTLLSDITRLDLGKRILDPRGIYRCNGTDIYKDK | |
| domain | ESTVQVHYRTADTQALLRNDQVYQPLRDRDDAQYSHLG | |
| | GNWARNK | |
| CD3 delta chain | DQVYQPLRDRDDAQYSHLGGN | 462 |
| intracellular signaling | | |
| domain | | |
| CD3 delta intracellular | MEHSTFLSGLVLATLLSQVSPFKIPIEELEDRVFVNCNTSIT | 463 |
| domain | WVEGTVGTLLSDITRLDLGKRILDPRGIYRCNGTDIYKDK | |
| | ESTVQVHYRMCQSCVELDPATVAGIIVTDVIATLLLALGV | |
| | FCFAGHETGRLSGAADTQALLRNDQVYQPLRDRDDAQYS | |
| | HLGGNWARNK | |
| CD3 delta intracellular | MEHSTFLSGLVLATLLSQVSPFKIPIEELEDRVFVNCNTSIT | 464 |
| domain | WVEGTVGTLLSDITRLDLGKRILDPRGIYRCNGTDIYKDK | |
| | ESTVQVHYRTADTQALLRNDQVYQPLRDRDDAQYSHLG | |
| | GNWARNK | |
| CD3 delta intrcellular | DQVYQPLRDRDDAQYSHLGGN | 465 |
| domain | | |
| CD3 epsilon | MQSGTHWRVLGLCLLSVGVWGQDGNEEMGGITQTPYKV | 466 |
| intracellular domain | SISGTTVILTCPQYPGSEILWQHNDKNIGGDEDDKNIGSDE | |
| | DHLSLKEFSELEQSGYYVCYPRGSKPEDANFYLYLRARVC | |
| | ENCMEMDVMSVATIVIVDICITGGLLLLVYYWSKNRKAK | |
| | AKPVTRGAGAGGRQRGQNKERPPPVPNPDYEPIRKGQRD | |
| | LYSGLNQRRI | |
| CD3 epsilon | NPDYEPIRKGQRDLYSGLNQR | 467 |
| intracellular domain | | |
| CD3 gamma | MEQGKGLAVLILAIILLQGTLAQSIKGNHLVKVYDYQEDG | 468 |
| intracellular domain | SVLLTCDAEAKNITWFKDGKMIGFLTEDKKKWNLGSNAK | |
| | DPRGMYQCKGSQNKSKPLQVYYRMCQNCIELNAATISGF | |
| | LFAEIVSIFVLAVGVYFIAGQDGVRQSRASDKQTLLPNDQ | |
| | LYQPLKDREDDQYSHLQGNQLRRN, | |
| CD3 gamma | DQLYQPLKDREDDQYSHLQGN | 469 |
| intracellular domain | | |
| CD3 gamma | DQLYQPLKDREDDQYSHLQGN | 470 |
| intracellular domain | | |
| CD3 gamma | MEQGKGLAVLILAIILLQGTLAQSIKGNHLVKVYDYQEDG | 471 |
| intracellular domain | SVLLTCDAEAKNITWFKDGKMIGFLTEDKKKWNLGSNAK | |
| | DPRGMYQCKGSQNKSKPLQVYYRMCQNCIELNAATISGF | |
| | LFAEIVSIFVLAVGVYFIAGQDGVRQSRASDKQTLLPNDQ | |
| | LYQPLKDREDDQYSHLQGNQLRRN | |
| CD3 zeta intracellular | MKWKALFTAAILQAQLPITEAQSFGLLDPKLCYLLDGILFI | 472 |
| domain | YGVILTALFLRVKFSRSADAPAYQQGQNQLYNELNLGRR | |
| | EEYDVLDKRRGRDPEMGGKPRRKNPQEGLYNELQKDKM | |
| | AEAYSEIGMKGERRRGKGHDGLYQGLSTATKDTYDALH | |
| | MQALPPR | |
| CD3 zeta intracellular | MKWKALFTAAILQAQLPITEAQSFGLLDPKLCYLLDGILFI | 473 |
| domain | YGVILTALFLRVKFSRSADAPAYQQGQNQLYNELNLGRR | |
| | EEYDVLDKRRGRDPEMGGKPQRRKNPQEGLYNELQKDK | |
| | MAEAYSEIGMKGERRRGKGHDGLYQGLSTATKDTYDAL | |
| | HMQALPPR | |
| CD3 zeta intracellular | MKWKALFTAAILQAQLPITEAQSFGLLDPKLCYLLDGILFI | 474 |
| domain | YGVILTALFLRVKFSRSADAPAYQQGQNQLYNELNLGRR | |
| | EEYDVLDKRRGRDPEMGGKPQRRKNPQEGLYNELQKDK | |
| | MAEAYSEIGMKGERRRGKGHDGLYQGLSTATKDTYDAL | |
| | HMQALPPR | |
| CD3 zeta intracellular | NQLYNELNLGRREEYDVLDKR | 475 |
| domain | | |
| CD3 zeta domain 2 | RVKFSRSADAPAYQQGQNQLYNELNLGRREEYDVLDKR | 476 |
| (NM_000734.3) | RGRDPEMGGKPRRKNPQEGLYNELQKDKMAEAYSEIGM | |
| | KGERRRGKGHDGLYQGLSTATKDTYDALHMQALPPR | |
| CD3 zeta intracellular | DGLYQGLSTATKDTYDALHMQ | 477 |
| domain | | |
| CD3 zeta intracellular | RVKFSRSAEPPAYQQGQNQLYNELNLGRREEYDVLDKRR | 478 |
| domain | GRDPEMGGKPRRKNPQEGLYNELQKDKMAEAYSEIGMK | |
| | GERRRGKGHDGLYQGLSTATKDTYDALHMQALPPR | |
| CD3 zeta intracellular | RVKFSRSADAPAYQQGQNQLYNELNLGRREEYDVLDKR | 479 |
| domain | RGRDPEMGGKPQRRKNPQEGLYNELQKDKMAEAYSEIG | |
| | [sequence omitted] | |
| CD3 zeta intracellular | RSRVKFSRSADAPAYQQGQNQLYNELNLGRREEYDVLDK | 480 |
| domain | RRGRDPEMGGKPRRKNPQEGLYNELQKDKMAEAYSEIG | |
| | [sequence omitted] | |
| CD3 zeta intracellular | RVKFSRSADAPAYQQGEYDVLDKRRGRDPEMGGKPRRK | 481 |
| domain | NPQEGLYNELQKDKMAEAYSEIGMKGERRRGKGHDGLY | |
| | QGLSTATKDTYDALHMQALPPR | |
| CD3 zeta intracellular | RVKFSRSADAPAYQQGQNQLYNELNLGRREEVDVLDKR | 482 |
| domain | RGRDPEMGGKPRRKNPQEGLYNELQKDKMAEAYSEIGM | |
| | KGERRRGKGHDGLYQGLSTATKDTYDALHMQALPPR | |
| CD3 zeta intracellular | MIPAVVLLLLLLVEQAAALGEPQLCYILDAILFLVGIVLTL | 483 |
| domain | LVCRLKIQVRKAAITSYEKSRVKFSRSADAPAYQQGQNQL | |
| | YNELNLGRREEYDVLDKRRGRDPEMGGKPRRKNPQEGL | |
| | YNELQKDKMAEAVSEIGMKGERRRGKGHDGLYQGLSTA | |
| | TKDTYDALHMQALPPR | |
| CD3 zeta intracellular | LRVKFSRSADAPAYQQGQNQLYNELNLGRREEYDVLDKR | 484 |
| domain | RGRDPEMGGKPRRKNPQEGLYNELQKDKMAEAYSEIGM | |
| | KGERRRGKGHDGLYQGLSTATKDTYDALHMQALPPR | |
| CD3 zeta intracellular | RVKFSRSADAPAYQQGQNQLYNELNLGRREEYDVLDKR | 485 |
| domain | RGRDPEMGGKPQRRKNPQEGLY | |
| CD3 zeta intracellular | LRVKFSRSADAPAYQQGQNQLYNELNLGRREEYDVLDKR | 486 |
| domain | RGRDPEMGGKPQRRKNPQEGLYNELQKDKMAEAYSEIG | |
| | [sequence omitted] | |
| CD3 zeta intracellular | RRVKFSRSADAPAYQQGQNQLYNELNLGRREEYDVLDK | 487 |
| domain | RRGRDPEMGGKPRRKNPQEGLYNELQKDKMAEAYSEIG | |
| | [sequence omitted] | |
| CD3 zeta intracellular | NQLYNELNLGRREEYDVLDKR | 488 |
| domain | | |
| CD3 zeta intracellular | EGLYNELQKDKMAEAYSEIGMK | 489 |
| domain | | |
| CD3 zeta intracellular | DGLYQGLSTATKDTYDALHMQ | 490 |
| domain | | |
| CD3 zeta intracellular | RVKFSRSADAPAYQQGQNQLYNELNLGRREEYDVLDKR | 491 |
| domain | RGRDPEMGGKPRRKNPQEGLYNELQKDKMAEAYSEIGM | |
| | KGERRRGKGHDGLYQGLSTATKDTYDALHMQALPPR | |
| CD3 zeta intracellular | RVKFSRSADAPAYKQGQNQLYNELNLGRREEYDVLDKR | 492 |
| domain | RGRDPEMGGKPRRKNPQEGLYNELQKDKMAEAYSEIGM | |
| | KGERRRGKGHDGLYQGLSTATKDTYDALHMQALPPR | |
| CD3 zeta intracellular | RVKFSRSADAPAYQQGQNQLYNELNLGRREEYDVLDKR | 493 |
| domain | RGRDPEMGGKPRRKNPQEGLYNELQKDKMAEAYSEIGM | |
| | KGERRRGKGHDGLYQGLSTATKDTYDALHMQALP | |
| CD3 zeta intracellular | DPKLCYLLDGILFIYGVILTALFLRVKFSRSADAPAYQQGQ | 494 |
| domain | NQLYNELNLGRREEYDVLDKRRGRDPEMGGKPQRRKNP | |
| | QEGLYNELQKDKMAEAYSEIGMKGERRRGKGHDGLYQG | |
| | LSTATKDTYDALHMQALPPR | |
| CD3 zeta intracellular | MKWKALFTAAILQAQLPITEAQSFGLLDPKLCYLLDGILFI | 495 |
| domain | YGVILTALFLRVKFSRSADAPAYQQGQNQLYNELNLGRR | |
| | EEYDVLDKRRGRDPEMGGKPRRKNPQEGLYNELQKDKM | |
| | AEAYSEIGMKGERRRGKGHDGLYQGLSTATKDTYDALH | |
| | MQALPPR | |
| CD40 intracellular | RSRDQRLPPDAHKPPGGGSFRTPIQEEQADAHSTLAKI | 496 |
| domain | | |
| CD79A intracellular | MPGGPGVLQALPATIFLLFLLSAVYLGPGCQALWMHKVP | 497 |
| domain | ASLMVSLGEDAHFQCPHNSSNNANVTWWRVLHGNYTWP | |
| | PEFLGPGEDPNGTLIIQNVNKSHGGIYVCRVQEGNESYQQ | |
| | SCGTYLRVRQPPPRPFLDMGEGTKNRIITAEGIILLFCAVVP | |
| | GTLLLFRKRWQNEKLGLDAGDEYEDENLYEGLNLDDCS | |
| | MYEDISRGLQGTYQDVGSLNIGDVQLEKP | |
| CD79A intracellular | MPGGPGVLQALPATIFLLFLLSAVYLGPGCQALWMHKVP | 498 |
| domain | ASLMVSLGEDAHFQCPHNSSNNANVTWWRVLHGNYTWP | |
| | PEFLGPGEDPNEPPPRPFLDMGEGTKNRIITAEGIILLFCAV | |
| | VPGTLLLFRKRWQNEKLGLDAGDEYEDENLYEGLNLDDC | |
| | SMYEDISRGLQGTYQDVGSLNIGDVQLEKP | |
| CD79A intracellular | MPGGPGVLQALPATIFLLFLLSAVYLGPGCQALWMHKVP | 499 |
| domain | ASLMVSLGEDAHFQCPHNSSNNANVTWWRVLHGNYTWP | |
| | PEFLGPGEDPNGTLIIQNVNKSHGGIYVCRVQEGNESYQQ | |
| | SCGTYLRVRQPPPRPFLDMGEGTKNRIITAEGIILLFCAVVP | |
| | GTLLLFRKRWQNEKLGLDAGDEYEDENLYEGLNLDDCS | |
| | MYEDISRGLQGTYQDVGSLNIGDVQLEKP | |
| CD79A intracellular | ENLYEGLNLDDCSMYEDISRG | 500 |
| domain | | |
| CD8 intracellular | FVPVFLPAKPTTTPAPRPPTPAPTIASQPLSLRPEACRPAAG | 501 |
| domain | GAVHTRGLDFACDIYIWAPLAGTCGVLLLSLVITLYCNHR | |
| | NR | |
| CD8 intracellular | FVPVFLPAKPITTPAPRPPTPAPTIASQPLSLRPEACRPAAG | 502 |
| domain | GAVHTRGLDFACDIYIWAPLAGTCGVLLLSLVITLYCNHR | |
| | NR | |
| CD8a intracellular | PTTTPAPRPPTPAPTIASQPLSLRPEACRPAAGGAVHTRGL | 503 |
| domain | DFACDI | |
| CTLA4 intracellular | AVSLSKMLKKRSPLTTGVFVKMAPTEAECEKQFQPYFIPI | 504 |
| domain | N | |
| CTLA4 intracellular | AVSLSKMLKKRSPLTTGVYMNMTPRRPECEKQFQPYAPP | 505 |
| domain | RDFAAYRS | |
| DAP10 intracellular | RPRRSPAQDGKVYINMPGRG | 506 |
| domain | | |
| DAP12 intracellular | MGGLEPCSRLLLLPLLLAVSGLRPVQAQAQSDCSCSTVSP | 507 |
| domain | GVLAGIVMGDLVLTVLIALAVYFLGRLVPRGRGAAEAAT | |
| | RKQRITETESPYQELQGQRSDVYSDLNTQRPYYK | |
| DAP12 intracellular | MGGLEPCSRLLLLPLLLAVSGLRPVQAQAQSDCSCSTVSP | 508 |
| domain | GVLAGIVMGDLVLTVLIALAVYFLGRLVPRGRGAAEATR | |
| | KQRITETESPYQELQGQRSDVYSDLNTQRPYYK | |
| DAP12 intracellular | MGGLEPCSRLLLLPLLLAVSDCSCSTVSPGVLAGIVMGDL | 509 |
| domain | VLTVLIALAVYFLGRLVPRGRGAAEAATRKQRITETESPY | |
| | QELQGQRSDVYSDLNTQRPYYK | |
| DAP12 intracellular | MGGLEPCSRLLLLPLLLAVSDCSCSTVSPGVLAGIVMGDL | 510 |
| domain | VLTVLIALAVYFLGRLVPRGRGAAEATRKQRITETESPYQ | |
| | ELQGQRSDVYSDLNTQRPYYK | |
| DAP12 intracellular | MGGLEPCSRLLLLPLLLAVSGLRPVQAQAQSDCSCSTVSP | 511 |
| domain | GVLAGIVMGDLVLTVLIALAVYFLGRLVPRGRGAAEAAT | |
| | RKQRITETESPYQELQGQRSDVYSDLNTQRPYYK | |
| DAP12 intracellular | MGGLEPCSRLLLLPLLLAVSGLRPVQAQAQSDCSCSTVSP | 512 |
| domain | GVLAGIVMGDLVLTVLIALAVYFLGRLVPRGRGAAEATR | |
| | KQRITETESPYQELQGQRSDVYSDLNTQRPYYK; | |
| DAP12 intracellular | MGGLEPCSRLLLLPLLLAVSDCSCSTVSPGVLAGIVMGDL | 513 |
| domain | VLTVLIALAVYFLGRLVPRGRGAAEAATRKQRITETESPY | |
| | QELQGQRSDVYSDLNTQRPYYK | |
| DAP12 intracellular | MGGLEPCSRLLLLPLLLAVSDCSCSTVSPGVLAGIVMGDL | 514 |
| domain | VLTVLIALAVYFLGRLVPRGRGAAEATRKQRITETESPYQ | |
| | ELQGQRSDVYSDLNTQRPYYK | |
| DAP12 intracellular | ESPYQELQGQRSDVYSDLNTQ | 515 |
| domain | | |
| DAP12 intracellular | ESPYQELQGQRSDVYSDLNTQ | 516 |
| domain | | |
| GITR intracellular | RSQCMWPRETQLLLEVPPSTEDARSCQFPEEERGERSAEE | 517 |
| domain | KGRLGDLWV | |
| ICOS intracellular | TKKKYSSSVHDPNGEFMFMRAVNTAKKSRLTDVTL | 518 |
| domain | | |
| IL15Ra intracellular | KSRQTPPLASVEMEAMEALPVTWGTSSRDEDLENCSHHL | 519 |
| domain | | |
| OX40-CD3 Zeta | RRDQRLPPDAHKPPGGGSFRTPIQEEQADAHSTLAKIRVK | 520 |
| intracellular domain | FSRSADAPAYQQGQNQLYNELNLGRREEYDVLDKRRGR | |
| | DPEMGGKPRRKNPQEGLYNELQKDKMAEAYSEIGMKGE | |
| | RRRGKGHDGLYQGLSTATKDTYDALHMQALPPR | |
| ZAP70 intracellular | MPDPAAHLPFFYGSISRAEAEEHLKLAGMADGLFLLRQCL | 521 |
| domain | RSLGGYVLSLVHDVRFHHFPIERQLNGTYAIAGGKAHCGP | |
| | AELCEFYSRDPDGLPCNLRKPCNRPSGLEPQPGVFDCLRD | |
| | AMVRDYVRQTWKLEGEALEQAIISQAPQVEKLIATTAHE | |
| | RMPWYHSSLTREEAERKLYSGAQTDGKFLLRPRKEQGTY | |
| | ALSLIYGKTVYHYLISQDKAGKYCIPEGTKFDTLWQLVEY | |
| | LKLKADGLIYCLKEACPNSSASNASGAAAPTLPAHPSTLT | |
| | HPQRRIDTLNSDGYTPEPARITSPDKPRPMPMDTSVYESPY | |
| | SDPEELKDKKLFLKRDNLLIADIELGCGNFGSVRQGVYRM | |
| | RKKQIDVAIKVLKQGTEKADTEEMMREAQIMHQLDNPYI | |
| | VRLIGVCQAEALMLVMEMAGGGPLHKFLVGKREEIPVSN | |
| | VAELLHQVSMGMKYLEEKNFVHRDLAARNVLLVNRHYA | |
| | KISDFGLSKALGADDSYYTARSAGKWPLKWYAPECINFR | |
| | KFSSRSDVWSYGVTMWEALSYGQKPYKKMKGPEVMAFI | |
| | EQGKRMECPPECPPELYALMSDCWIYKWEDRPDFLTVEQ | |
| | RMRACYYSLASKVEGPPGSTQKAEAACA | |
| CD28 intracellular | MLRLLLALNLFPSIQVTGNKILVKQSPMLVAYDNAVNLSC | 522 |
| domain | KYSYNLFSREFRASLHKGLDSAVEVCVVYGNYSQQLQVY | |
| | SKTGFNCDGKLGNESVTFYLQNLYVNQTDIYFCKIEVMYP | |
| | PPYLDNEKSNGTIIHVKGKHLCPSPLFPGPSKPFWVLVVVG | |
| | GVLACYSLLVTVAFIIFWVR | |
| 4-1BB intracellular | MGNSCYNIVATLLLVLNFERTRSLQDPCSNCPAGTFCDNN | 523 |
| domain | RNQICSPCPPNSFSSAGGQRTCDICRQCKGVFRTRKECSST | |
| | SNAECDCTPGFHCLGAGCSMCEQDCKQGQELTKKGCKD | |
| | CCFGTFNDQKRGICRPWTNCSLDGKSVLVNGTKERDVVC | |
| | GPSPADLSPGASSVTPPAPAREPGHSPQIISFFLALTSTALLF | |
| | LLFFLTLRFSVVKRGRKKLLYIFKQPFMRPVQTTQEEDG | |
| Fc epsilon Receptor I | MIPAVVLLLLLLVEQAAALGEPQLCYILDAILFLYGIVLTL | 524 |
| gamma chain | LYCRLKIQVRKAAITSYEKSDGVYTGLSTRNQETYETLKH | |
| intracellular domain | EKPPQ | |
| Fc epsilon Receptor I | DGVYTGLSTRNQETYETLKHE | 525 |
| gamma chain | | |
| intracellular domain | | |
| Fc epsilon Receptor I | DPKLCYILDAILFLYGIVLTLLYCRLKIQVRKAAITSYEKSD | 526 |
| gamma chain | GVYTGLSTRNQETYETLKHEKPPQ | |
| intracellular domain | | |
| Fc epsilon Receptor I | DGVYTGLSTRNQETYETLKHE | 527 |
| gamma chain | | |
| intracellular domain | | |

### Transmembrane Domains

[0540] In some embodiments, the CAR of the present invention may comprise a transmembrane domain. As used herein, the term “Transmembrane domain (TM)” refers broadly to an amino acid sequence of about 15 residues in length which spans the plasma membrane. More preferably, a transmembrane domain includes at least 20, 21, 22, 23, 24, 25, 26, 27, 28, 29, 30, 31, 32, 33, 34, 35, 36, 37, 38, 39, 40, 41, 42, 43, 44, or 45 amino acid residues and spans the plasma membrane. In some embodiments, the transmembrane domain of the present invention may be derived either from a natural or from a synthetic source. The transmembrane domain of a CAR may be derived from any naturally membrane-bound or transmembrane protein. For example, the transmembrane region may be derived from (i.e. comprise at least the transmembrane region(s) of) the alpha, beta or zeta chain of the T-cell receptor, CD3 epsilon, CD4, CD5, CD8, CD8α, CD9, CD16, CD22, CD33, CD28, CD37, CD45, CD64, CD80, CD86, CD134, CD137, CD152, or CD154.

[0541] Alternatively, the transmembrane domain of the present invention may be synthetic. In some aspects, the synthetic sequence may comprise predominantly hydrophobic residues such as leucine and valine.

[0542] In some embodiments, the transmembrane domain of the present invention may be selected from the group consisting of a CD8a transmembrane domain, a CD4 transmembrane domain, a CD 28 transmembrane domain, a CTLA-4 transmembrane domain, a PD-1 transmembrane domain, and a human IgG4Fc region. As non-limiting examples, the transmembrane domain may be a CTLA-4 transmembrane domain comprising the amino acid sequences of SEQ ID NOs.: 1-5 of International Patent Publication NO.: WO2014/100385; and a PD-1 transmembrane domain comprising the amino acid sequences of SEQ ID NOs.: 6-8 of International Patent Publication NO.: WO2014100385; the contents of each of which are incorporated herein by reference in their entirety.

[0543] In some embodiments, the CAR of the present invention may comprise an optional hinge region (also called spacer). A hinge sequence is a short sequence of amino acids that facilitates flexibility of the extracellular targeting domain that moves the target binding domain away from the effector cell surface to enable proper cell/cell contact, target binding and effector cell activation (Patel et al., Gene Therapy, 1999; 6: 412-419). The hinge sequence may be positioned between the targeting moiety and the transmembrane domain. The hinge sequence can be any suitable sequence derived or obtained from any suitable molecule. The hinge sequence may be derived from all or part of an immunoglobulin (e.g., IgG1, IgG2, IgG3, IgG4) hinge region, i.e., the sequence that falls between the CH1 and CH2 domains of an immunoglobulin, e.g., an IgG4 Fc hinge, the extracellular regions of type 1 membrane proteins such as CD8 CD4, CD28 and CD7, which may be a wild type sequence or a derivative. Some hinge regions include an immunoglobulin CH3 domain or both a CH3 domain and a CH2 domain. In certain embodiments, the hinge region may be modified from an IgG1, IgG2, IgG3, or IgG4 that includes one or more amino acid residues, for example, 1, 2, 3, 4 or 5 residues, substituted with an amino acid residue different from that present in an unmodified hinge. Table 15 provides various transmembrane regions that can be used in the CARs described herein.

TABLE 15
Transmembrane domains

| | | SEQ |
|---|---|---|
| | | ID |
| Transmembrane domain | Amino Acid Sequence | NO. |
| CD8 Transmembrane | TTTPAPRPPTPAPTIASQPLSLRPEACRPAAGGAVHTRGLDF | 528 |
| domain | ACDI | |
| 2B4 Transmembrane | FLVIIVILSALFLGTLACFCV | 577 |
| domain | | |
| 4-1BB Transmembrane | IISFFLALTSTALLFLLFFLTLRFSVVKRGR | 529 |
| domain | | |
| 4-1BB Transmembrane | IISFFLALTSTALLFLLFFLTLRFSVV | 530 |
| domain | | |
| CD134(OX40) | VAAILGLGLVLGLLGPLAILLALYLL | 531 |
| Transmembrane domain | | |
| CD148 Transmembrane | AVFGCIFGALVIVTVGGFIFWRKKRKDAKNNEVSFSQIKPK | 532 |
| and intracellular domain | KSKLIRVENFEAYFKKQQADSNCGFAEEYEDLKLVGISQPK | |
| | YAAELAENRGKNRYNNVLPYDISRVKLSVQTHSTDDYINA | |
| | NYMPGYHSKKDFIATQGPLPNTLKDFWRMVWEKNVYAII | |
| | MLTKCVEQGRTKCEEYWPSKQAQDYGDITVAMTSEIVLPE | |
| | VVTIRDFTVKNIQTSESHPLRQFHFTSWPDHGVPDTTDLLIN | |
| | FRYLVRDYMKQSPPESPILVHCSAGVGRTGTFIAIDRLIYQI | |
| | ENENTVDVYGIVYDLRMHRPLMVQTEDQYVFLNQCVLDI | |
| | VRSQKDSKVDLIYQNTTAMTIYENLAPVTTFGKTNGYIA | |
| CD148 Transmembrane | AVFGCIFGALVIVTVGGFIFW | 533 |
| domain | | |
| CD2 Transmembrane | KEITNALETWGALGQDINLDIPSFQMSDDIDDIKWEKTSDK | 534 |
| domain | KKIAQFRKEKETFKEKDTYKLFKNGTLKIKHLKTDDQDIYK | |
| | VSIYDTKGKNVLEKIFDLKIQERVSKPKISWTCINTTLTCEV | |
| | MNGTDPELNLYQDGKHLKLSQRVITHKWTTSLSAKFKCTA | |
| | GNKVSKESSVEPVSCPEKGLD | |
| CD28 Transmembrane and | IEVMYPPPYLDNEKSNGTITHVKGKHLCPSPLFPGPSKPFW | 535 |
| intracellular domain | VLVVVGGVLACYSLLVTVAHIFWVRSKRSRLLHSDYMNM | |
| | TPRRPGPTRKHYQPYAPPRDFAAYRS | |
| CD28 Transmembrane | FWVLVVVGGVLACYSLLVTVAFIIFWV | 536 |
| domain | | |
| CD28 Transmembrane | IEVMYPPPYLDNEKSNGTIIHVKGKHLCPSPLFPGPSKPFWV | 537 |
| domain | LVVVGGVLACYSLLVTVAFIIFWV | |
| CD28 Transmembrane | IFWVLVVVGGVLACYSLLVTVAFIIFWVRSKRR | 538 |
| domain | | |
| CD28 Transmembrane | FWVLVVVGGVLACYSLLVTVAFIIFWVRSKRSRLLHSDYM | 539 |
| domain | NMTPRRPGPTRKHYQPYAPPRDFAAYRS | |
| CD28 Transmembrane | MFWVLVVVGGVLACYSLLVTVAFIIFWV | 540 |
| domain | | |
| CD28 Transmembrane | FWVLVVVGGVLACYSLLVTVAFHFWV | 541 |
| domain | | |
| CD28 Transmembrane | FWVLVVVGGVLACYSLLVTVAFIIFWVRSKRSRLLHSDYM | 578 |
| domain | NMTPRRPGPTRKHYQAYAAARDFAAYRS | |
| CD28 Transmembrane | IEVMYPPPYLDNEKSNGTIIHVKGKHLCPSPLFPGPSKPFWV | 579 |
| domain | LWVGGVLACYSLLVTVAFIIFWVRSKRSRLLHSDYMNMTP | |
| | RRPGPTRKHYQPYAPPRDFAAYRS | |
| CD28 Transmembrane | MFWVLVVVGGVLACYSGGVTVAFIIFWV | 542 |
| domain | | |
| CD28 Transmembrane | WVLVVVGGVLACYSLLVTVAFIIFWV | 543 |
| domain | | |
| CD28 Transmembrane | FWVLVVVGGVLACYSLLVTVAFIIFWVR | 580 |
| domain | | |
| CD28 Transmembrane | PFWVLVVVGGVLACYSLLVTVAFIIFWVRSKRSRLLHSDY | 544 |
| domain | MNMTPRRPGPTRKHYQPYAPPRDFAAYRS | |
| CD28 Transmembrane | FWVLVVVGGVLACYSLLVTVAFIIFWVRSKRSRLLHSDYM | 545 |
| domain and CD28 and | NMTPRRPGPTRKHYQPYAPPRDFAAYRSRVKFSRSADAPA | |
| CD34 Zeta intracellular | YQQGQNQLYNELNLGRREEYDVLDKRRGRDPEMGGKPRR | |
| domain | KNPQEGLYNELQKDKMAEAYSEIGMKGERRRGKGHDGLY | |
| | QGLSTATKDTYDALHMQALPPR | |
| CD28 Transmembrane | FWVLVVVGGVLACYSLLVTVAFIIFWVRSKRSRLLHSDYM | 546 |
| domain and CD28, OX40, | NMTPRRPGPTRKHYQPYAPPRDFAAYRSRDQRLPPDAHKP | |
| and CD3 Zeta intracellular | PGGGSFRTPIQEEQADAHSTLAKIRVKFSRSADAPAYQQGQ | |
| domain | NQLYNELNLGRREEYDVLDKRRGRDPEMGGKPRRKNPQE | |
| | GLYNELQKDKMAEAYSEIGMKGERRRGKGHDGLYQGLST | |
| | ATKDTYDALHMQALPPR | |
| CD28 Transmembrane | FWVLVVVGGVLACYSLLVTVAFIIFWVRRVKFSRSADAPA | 547 |
| domain and CD3 Zeta | YQQGQNQLYNELNLGRREEYDVLDKRRGRDPEMGGKPRR | |
| intracellular domain | KNPQEGLYNELQKDKMAEAYSEIGMKGERRRGKGHDGLY | |
| | QGLSTATKDTYDALHMQALPPR | |
| CD28 transmembrane-CD3 | AAAIEVMYPPPYLDNEKSNGTIIHVKGKHLCPSPLFPGPSKP | 548 |
| zeta signaling domain | FWVLVVVGGVLACYSLLVTVAFIIFWVRSKRSRLLHSDYM | |
| (“28z”) | NMTPRRPGPTRKHYQPYAPPRDFAAYRSRVKFSRSADAPA | |
| | YQQGQNQLYNELNLGRREEYDVLDKRRGRDPEMGGKPRR | |
| | KNPQEGLYNELQKDKMAEAYSEIGMKGERRRGKGHDGLY | |
| | QGLSTATKDTYDALHMQALPPR | |
| CD3 zeta Transmembrane | LCYLLDGILFIYGVILTALFLRV | 549 |
| domain | | |
| CD3 zeta Transmembrane | MKWKALFTAAILQAQLPITEAQSFGLLDPKLCYLLDGILFIY | 550 |
| domain | GVILTALFL | |
| CD3 zeta Transmembrane | LCYLLDGILFIYGVILTALFL | 551 |
| domain | | |
| CD4 Transmembrane | ALIVLGGVAGLLLFIGLGIFFCVRC | 552 |
| domain | | |
| CD4 Transmembrane | MALIVLGGVAGLLLFIGLGIFF | 553 |
| domain | | |
| CD45 Transmembrane and | ALIAFLAFLIIVTSIALLVVLYKIYDLHKKRSCNLDEQQELV | 554 |
| intracellular domain | ERDDEKQLMNVEPIHADILLETYKRKIADEGRLFLAEFQSIP | |
| | RVFSKFPIKEARKPFNQNKNRYVDILPYDYNRVELSEINGD | |
| | AGSNYINASYIDGFKEPRKYIAAQGPRDETVDDFWRMIWE | |
| | QKATVIVMVTRCEEGNRNKCAEYWPSMEEGRAFGDVVV | |
| | KINQHKRCPDYIIQKLNIVNKKEKATGREVTHIQFTSWPDH | |
| | GVPEDPHLLLKLRRRVNAFSNFFSGPIWHCSAGVGRTGTYI | |
| | GIDAMLEGLEAENKVDVYGYVVKLRRQRCLMVQVEAQYI | |
| | LIHQALVEYNQFGETEVNLSELHPYLHNMKKRDPPSEPSPL | |
| | EAEFQRLPSYRSWRTQHIGNQEENKSKNRNSNVIPYDYNR | |
| | VPLKHELEMSKESEHDSDESSDDDSDSEEPSKYINASFIMSY | |
| | WKPEVMIAAQGPLKETIGDFWQMIFQRKVKVIVMLTELKH | |
| | GDQEICAQYWGEGKQTYGDIEVDLKDTDKSSTYTLRVFEL | |
| | RHSKRKDSRTVYQYQYTNWSVEQLPAEPKELISMIQWKQK | |
| | LPQKNSSEGNKHHKSTPLLIHCRDGSQQTGIFCALLNLLES | |
| | AETEEWDIFQWKALRKARPGMVSTFEQYQFLYDVIASTYP | |
| | AQNGQVKKNNHQEDKIEFDNEVDKVKQDANCVNPLGAPE | |
| | KLPEAKEQAEGSEPTSGTEGPEHSVNGPASPALNQGS | |
| CD62L Transmembrane | PLFIPVAVMVTAFSGLAFIIWLA | 555 |
| domain | | |
| CD7 Transmembrane | ALPAALAVISFLLGLGLGVACVLA | 556 |
| domain | | |
| CD8 Transmembrane | MALPVTALLLPLALLLHAARP | 557 |
| domain | | |
| CD8 Transmembrane | AAAFVPVFLPAKPTTTPAPRPPTPAPTIASQPLSLRPEACRPA | 558 |
| domain and CD28 | AGGAVHTRGLDFACDIYIWAPLAGTCGVLLLSLVITLYCN | |
| signaling domain | HRNRSKRSRLLHSDYMNMTPRRPGPTRKHYQPYAPPRDFA | |
| | AYRSRFSVVKRGRKKLLYIFKQPFMRPVQTTQEEDGCSCRF | |
| | PEEEEGGCELRVKFSRSADAPAYQQGQNQLYNELNLGRRE | |
| | EYDVLDKRRGRDPEMGGKPRRKNPQEGLYNELQKDKMA | |
| | EAYSEIGMKGERRRGKGHDGLYQGLSTATKDTYDALHMQ | |
| | ALPPR | |
| CD8 transmembrane | AAATTTPAPRPPTPAPTIASQPLSLRPEACRPAAGGAVHTR | 559 |
| domain-CD137 (4-1BB) | GLDFACDIYIWAPLAGTCGVLLLSLVITLYCKRGRKKLLYI | |
| signaling domain and CD3 | FKQPFMRPVQTTQEEDGCSCRFPEEEEGGCELRVKFSRSAD | |
| zeta signaling domain | APAYKQGQNQLYNELNLGRREEYDVLDKRRGRDPEMGG | |
| (“BBz”) | KPRRKNPQEGLYNELQKDKMAEAYSEIGMKGERRRGKGH | |
| | DGLYQGLSTATKDTYDALHMQALPPR | |
| CD8a Transmembrane | FVPVFLPAKPTTTPAPRPPTPAPTIASQPLSLRPEACRPAAGG | 560 |
| domain | AVHTRGLDFACDIYIWAPLAGTCGVLLLSLVITLYCNHRN | |
| CD8a Transmembrane | IWAPLAGTCGVLLLSLVITLYC | 561 |
| domain | | |
| CD8a Transmembrane | IYIWAPLAGTCGVLLLSLVITLYC | 562 |
| domain | | |
| CD8a Transmembrane | IYIWAPLAGTCGVLLLSLVITLYCR | 563 |
| domain | | |
| CD8a Transmembrane | PTTTPAPRPPTPAPTIASQPLSLRPEACRPAAGGAVHTRGLD | 564 |
| domain | FACDIYIWAPLAGTCGVLLLSLVITLYCN | |
| CD8a Transmembrane | IYIWAPLAGTCGVLLLSLVITLVCR | 565 |
| domain | | |
| CD8a Transmembrane | IYIWAPLAGTCGVLLLSLVIT | 566 |
| domain | | |
| CD8a Transmembrane | IYIWAPLAGTCGVLLLSLVITLY | 567 |
| domain | | |
| CD8a Transmembrane | TPAPRPPTPAPTIASQPLSLRPEACRPAAGGAWTRGLDFAC | 581 |
| domain (NP 001139345.1) | DIYIWAPLAGTCGVLLLSLVITLYCNHRNRRR | |
| CD8b Transmembrane | LGLLVAGVLVLLVSLGVAIHLCC | 582 |
| domain | | |
| DAP10 Transmembrane | ILLAGLVAADAVASLLIVGAVFLCARR | 583 |
| domain | | |
| EpoR Transmembrane | APVGLVARLADESGHVVLRWLPPPETPMTSHIRYEVDVSA | 568 |
| domain | GNGAGSVQRVEILEGRTECVLSNLRGRTRYTFAVRARMAE | |
| | PSFGGFWSAWSEPVSLLTPSD | |
| FcERI a Transmembrane | FFIPLLVVILFAVDTGLFISTQQQVTFLLKIKRRKGFRLLNP | 569 |
| domain | HPKPNPKNN | |
| FcERI a-Transmembrane | MAPAMESPTLLCVALLFFAPDGVLAVPQKPKVSLNPPWNR | 570 |
| domain | IFKGENVTLTCNGNNFFEVSSTKWFHNGSLSEETNSSLNIV | |
| | NAKFEDSGEYKCQHQQVNESEPVYLEVFSDWLLLQASAEV | |
| | VMEGQPLFLRCHGWRNWDVYKVIYYKDGEALKYWYENH | |
| | NISITNATVEDSGTYYCTGKVWQLDYESEPLNITVIKAPRE | |
| | KYWLQFFIPLLVVILFAVDTGLFISTQQQVTFLLKIKRTRKG | |
| | FRLLNPHPKPNPKNN | |
| FcERI b-Transmembrane | MDTESNRRANLALPQEPSSVPAFEVLEISPQEVSSGRLLKSA | 571 |
| region | SSPPLHTWLTVLKKEQEFLGVTQILTAMICLCFGTVVCSVL | |
| | DISHIEGDIFSSFKAGYPFWGAIFFSISGMLSIISERRNATYLV | |
| | RGSLGANTASSIAGGTGITILIINLKKSLAYIHIHSCQKFFETK | |
| | CFMASFSTEIVVMMLFLTILGLGSAVSLTICGAGEELKGNK | |
| | VPEDRVYEELNIYSATYSELEDPGEMSPPIDL | |
| FcERI g-Transmembrane | MIPAVVLLLLLLVEQAAALGEPQLCYILDAILFLYGIVLTLL | 572 |
| region | YCRLKIQVRKAAITSYEKSDGVYTGLSTRNQETYETLKHEK | |
| | PPQ | |
| FcERIa Transmembrane | DIFIPLLVVILFAVDTGLFISTQQQVTFLLKIKRTRKGFRLLN | 573 |
| domain | PHPKPNPKNNR | |
| GITR Transmembrane | PLGWLTVVLLAVAACVLLLTSAQLGLHIWQL | 574 |
| domain | | |
| Her2 Transmembrane | SIISAVVGILLVVVLGVVFGILII | 575 |
| domain | | |
| Her2 Transmembrane | CHPECQPQNGSVTCFGPEADQCVACAHYKDPPFCVARCPS | 576 |
| domain | GVKPDLSYMPIWKFPDEEGACQPCPINCTHSCVDLDDKGC | |
| | PAEQRASPLTSIISAVVGILLVVVLGVVFGILI | |
| ICOS Transmembrane | FWLPIGCAAFVVVCILGCILI | 584 |
| domain | | |
| IgG1 Transmembrane | EPKSPDKTHTCPPCPAPPVAGPSVFLFPPKPKDTLMIARTPE | 585 |
| domain | VTCVVVDVSHEDPEVKFNWYVDGVEVHNAKTKPREEQY | |
| | NSTYRVVSVLTVLHQDWLNGKEYKCKVSNKALPAPIEKTI | |
| | SKAKGQPREPQVYTLPPSRDELTKNQVSLTCLVKGFYPSDI | |
| | AVEWESNGQPENNYKTTPPVLDSDGSFFLYSKLTVDKSRW | |
| | QQGNVFSCSVMHEALHNHYTQKSLSLSPGKKD | |
| LAG-3 Transmembrane | LLFLILGVLSLLLLVTGAFGF | 586 |
| domain | | |
| OX40 Transmembrane | VAAILGLGLVLGLLGPLAILL | 587 |
| domain | | |
| PD-1 Transmembrane | VGWGGLLGSLVLLVWVLAVI | 588 |
| domain | | |
| Transmembrane domain | FWALVVVAGVLFCYGLLVTVALCVIWT | 589 |
| CD28 transmembrane and | EIVMYPPPYLDNEKSNGTIIHVKGKHLCPSPLFPGPSKPFWV | 1346 |
| signaling domains | LVVVGGVLACYSLLVTVAFIIFWVRSKRSRLLHSDYMNMT | |
| | PRRPGPTRKHYQPYAPPRDFAAYRS | |
| CD28 Transmembrane | VMYPPPYLDNEKSNGTIIHVKGKHLCPSPLFPGPSKPFWVL | 1347 |
| domain | VVVGGVLACYSLLVTVAFIIFWVR | |
| CD8 Transmembrane | TTTPAPRPPTPAPTIASQPLSLRPEACRPAAGGAVHTRGLDF | 1348 |
| domain | ACDIYIWAPLAGTCGVLLLSLVITLYC | |

[0544] Hinge region sequences useful in the present invention are provided in Table 16.

TABLE 16
Hinge regions

| | | SEQ ID |
|---|---|---|
| Hinge Domain | Amino Acid Sequence | NO. |
| Hinge | DKTHT | 590 |
| Hinge | CPPC | 591 |
| Hinge | CPEPKSCDTPPPCPR | 592 |
| Hinge | ELKTPLGDTTHT | 593 |
| Hinge | KSCDKTHTCP | 594 |
| Hinge | KCCVDCP | 595 |
| Hinge | KYGPPCP | 596 |
| C233P Hinge | VEPKSPDKTHTCPPCP | 597 |
| C233S Hinge | LDPKSSDKTHTCPPCP | 598 |
| CD28 Hinge | IEVMYPPPYLDNEKSNGTIIHVKGKHLCPSPLFPGPSKP | 599 |
| CD8a Hinge | GGAVHTRGLDFA | 600 |
| CD8a Hinge | TTTPAPRPPTPAPTIASQPLSLRPEACRPAAGGAVHTRGLD | 601 |
| | FACD | |
| CD8a Hinge | AKPTTTPAPRPPTPAPTIASQPLSLRPEACRPAAGGAVHTR | 602 |
| | GLDFACD | |
| CD8a Hinge | TTTPAPRPPTPAPTIASQPLSLRPEACRPAAGGAVHTRGLD | 603 |
| | FACD | |
| CD8a Hinge | TTTPAPRPPTPAPTIASQPLSLRPEACRPAAGGAVHTRGLD | 604 |
| | FACD | |
| CD8a Hinge | TTTPAPRPPTPAPTIASQPLSLRPEACRPAAGGAVHTRGLD | 605 |
| | FACDEPKSPDKTHTCPPCPAPPVAGPSVFLFPPKPKDT | |
| CD8a Hinge | PAKPTTTPAPRPPTPAPTIASQPLSLRPEACRPAAGGAVHT | 606 |
| | RGLDFACDIY | |
| CD8a Hinge | TTTPAPRPPTPAPTIASQPLSLRPEACRPAAGGAVHTRGLD | 607 |
| | FACDIYIWAPLAGTCGVLLLSLVITLYC | |
| CD8a Hinge | TTPAPRPPTPAPTIASQPLSLRPEACRPAAGGAVHTRGLDF | 608 |
| | ACD | |
| CD8a Hinge | TTTPAPRPPTPAPTIASQPLSLRPEACRPAAGGAVHTRGLD | 609 |
| | FACDIY | |
| Delta5 Hinge | LDKTHTCPPCP | 610 |
| EpoR Hinge | APVGLVARLADESGHVVLRWLPPPETPMTSHIRYEVDVS | 611 |
| | AGNGAGSVQRVEILEGRTECVLSNLRGRTRYTFAVRARM | |
| | AEPSFGGFWSAWSEPVSLLTPSD | |
| FCRIIαHinge | GLAVSTISSFFPPGYQ | 612 |
| FcγRIIIαHinge | GLAVSTISSFFPPGYQ | 613 |
| Hinge | RWPESPKAQASSVPTAQPQAEGSLAKATTAPATTRNTGR | 614 |
| | GGEEKKKEKEKEEQEERETKTPECPSHTQPLGVYLLTPAV | |
| | QDLWLRDKATFTCFVVGSDLKDAHLTWEVAGKVPTGGV | |
| | EEGLLERHSNGSQSQHSRLTLPRSLWNAGTSVTCTLNHPS | |
| | LPPQRLMALREPAAQAPVKLSLNLLASSDPPEAASWLLCE | |
| | VSGFSPPNILLMWLEDQREVNTSGFAPARPPPQPGSTTFW | |
| | AWSVLRVPAPPSPQPATYTCVVSHEDSRTLLNASRSLEVS | |
| | YVTDH | |
| Hinge | YVTVSSQDPAEPKSPDKTHTCPPCPAPELLGGPSVFLFPPK | 615 |
| | PKDTLMISRTPEVTCVVVDVSHEDPEVKFNWYVDGVEVH | |
| | NAKTKPREEQYNSTYRVVSVLTVLHQDWLNGKEYKCKV | |
| | SNKALPAPIEKTISKAKGQPREPQVYTLPPSRDELTKNQVS | |
| | LTCLVKGFYPSDIAVEWESNGQPENNYKTTPPVLDSDGSF | |
| | FLYSKLTVDKSRWQQGNVFSCSVMHEALHNHYTQKSLSL | |
| | SPGKKDPK | |
| Hinge | KPTTTPAPRPPTPAPTIASQPLSLRPEACRPAAGGAVHTRG | 616 |
| | LDFA | |
| Hinge | LEPKSCDKTHTCPPCP | 617 |
| Hinge | KPTTTPAPRPPTPAPTIASQPLSLRPEACRPAAGGAVHTRG | 618 |
| | LD | |
| Hinge | EPKSCDKTHTCPPCP | 619 |
| Hinge | ELKTPLGDTHTCPRCP | 620 |
| Hinge | EPKSCDTPPPCPRCP | 621 |
| Hinge | ESKYGPPCPSCP | 622 |
| Hinge | ERKCCVECPPCP | 623 |
| Hinge | ELKTPLGDTHTCPRCP | 1105 |
| Hinge | EPKSCDTPPPCPRCP | 1106 |
| Hinge | ESKYGPPCPSCP | 1107 |
| Hinge(CH2- | ESKYGPPCPPCPAPEFLGGPSVFLFPPKPKDTLMISRTPEVT | 624 |
| CH3) | CVVVDVSQEDPEVQFNWYVDGVEVHNAKTKPREEQFNS | |
| | TYRVVSVLTVLHQDWLNGKEYKCKVSNKGLPSSIEKTISK | |
| | AKGQPREPQVYTLPPSQEEMTKNQVSLTCLVKGFYPSDIA | |
| | VEWESNGQPENNYKTTPPVLDSDGSFFLYSRLTVDKSRW | |
| | QEGNVFSCSVMHEALHNHYTQKSLSLSLGK | |
| Hinge(CH3) | ESKYGPPCPPCPGQPREPQVYTLPPSQEEMTKNQVSLTCL | 625 |
| | VKGFYPSDIAVEWESNGQPENNYKTTPPVLDSDGSFFLYS | |
| | RLTVDKSRWQEGNVFSCSVMHEALHNHYTQKSLSLSLGK | |
| IgD Hinge | RWPESPKAQASSVPTAQPQAEGSLAKATTAPATTRNTGR | 626 |
| | GGEEKKKEKEKEEQEERETKTPECPSHTQPLGVYLLTPAV | |
| | QDLWLRDKATFTCFVVGSDLKDAHLTWEVAGKVPTGGV | |
| | EEGLLERHSNGSQSQHSRLTLPRSLWNAGTSVTCTLNHPS | |
| | LPPQRLMALREPAAQAPVKLSLNLLASSDPPEAASWLLCE | |
| | VSGFSPPNILLMWLEDQREVNTSGFAPARPPPQPGSTTFW | |
| | AWSVLRVPAPPSPQPATYTCVVSHEDSRTLLNASRSLEVS | |
| | YVTDH | |
| IgD Hinge | RWPESPKAQASSVPTAQPQAEGSLAKATTAPATTRNTGR | 627 |
| | GGEEKKKEKEKEEQEERETKTPECPSHTQPLGVYLLTPAV | |
| | QDLWLRDKATFTCFVVGSDLKDAHLTWEVAGKVPTGGV | |
| | EEGLLERHSNGSQSQHSRLTLPRSLWNAGTSVTCTLHPSL | |
| | PPQRLMALREPAAQAPVKLSLNLLASSDPPEAASWLLCEV | |
| | SGFSPPNILLMWLEDQREVNTSGFAPARPPPQPGSTTFWA | |
| | WSVLRVPAPPSPQPATYTCVVSHEDSRTLLNASRSLEVSY | |
| | VTDH | |
| IgD Hinge | RWPESPKAQASSVPTAQPQAEGSLAKATTAPATTRNTGR | 628 |
| | GGEEKKKEKEKEEQEERETKTPECPSHTQPLGVYLLTPAV | |
| | QDLWLRDKATFTCFVVGSDLKDAHLTWEVAGKVPTGGV | |
| | EEGLLERHSNGSQSQHSRLTLPRSLWNAGTSVTCTLNHPS | |
| | LPPQRLMALREPAAQAPVKLSLNLLASSDPPEAASWLLCE | |
| | VSGFSPPNILLMVVLEDQREVNTSGFAPARPPPQPGSTTFW | |
| | AWSVLRVPAPPSPQPATYTCVVSHEDSRTLLNASRSLEVS | |
| | YVTDH | |
| IgD Hinge | ESPKAQASSVPTAQPQAEGSLAKATTAPATTRNTGRGGEE | 629 |
| | KKKEKEKEEQEERETKTP | |
| IgD Hinge | RWPESPKAQASSVPTAQPQAEGSLAKATTAPATTRNTGR | 630 |
| | GGEEKKKEKEKEEQEERETKTPECPSHTQPLGVYLLTPAV | |
| | QDLWLRDKATFTCFVVGSDLKDAHLTWEVAGKVPTGGV | |
| | EEGLLERHSNGSQSQHSRLTLPRSLWNAGTSVTCTLNHPS | |
| | LPPQRLMALREPAAQAPVKLSLNLLASSDPPEAASWLLCE | |
| | VSGFSPPNILLMWLEDQREVNTSGFAPARPPPQPGSTTFW | |
| | AWSVLRVPAPPSPQPATYTCVVSHEDSRTLLNASRSLEVS | |
| | YVTDH | |
| IgD Hinge | RWPESPKAQASSVPTAQPQAEGSLAKATTAPATTRNTGR | 631 |
| | GGEEKKKEKEKEEQEERETKTPECPSHTQPLGVYLLTPAV | |
| | QDLWLRDKATFTCFVVGSDLKDAHLTWEVAGKVPTGGV | |
| | EEGLLERHSNGSQSQHSRLTLPRSLWNAGTSVTCTLNHPS | |
| | LPPQRLMALREPAAQAPVKLSLNLLASSDPPEAASWLLCE | |
| | VSGFSPPNILLMWLEDQREVNTSGFAPARPPPQPGSTTFW | |
| | AWSVLRVPAPPSPQPATYTCVVSHEDSRTLLNASRSLEVS | |
| | YVTDH | |
| IgD Hinge | RWPESPKAQASSVPTAQPQAEGSLAKATTAPATTRNTGR | 632 |
| | GGEEKKKEKEKEEQEERETKTPECPSHTQPLGVYLLTPAV | |
| | QDLWLRDKATFTCFVVGSDLKDAHLTWEVAGKVPTGGV | |
| | EEGLLERHSNGSQSQHSRLTLPRSLWNAGTSVTCTLNHPS | |
| | LPPQRLMALREPAAQAPVKLSLNLLASSDPPEAASWLLCE | |
| | VSGFSPPNILLMWLEDQREVNTSGFAPARPPPQPGSTTFW | |
| | AWSVLRVPAPPSPQPATYTCVVSHEDSRTLLNASRSLEVS | |
| | YVTDH | |
| IgD Hinge | RWPESPKAQASSVPTAQPQAEGSLAKATTAPAT | 1117 |
| | TRNTGRGGEEKKKEKEKEEQEERETKTPECPSH | |
| | TQPLGVYLLTPAVQDLWLRDKATFTCFVVGSD | |
| | LKDAHLTWEVAGKVPTGGVEEGLLERHSNGSQ | |
| | SQHSRLTLPRSLWNAGTSVTCTLNHPSLPPQRL | |
| | MALREPAAQAPVKLSLNLLASSDPPEAASWLLC | |
| | EVSGFSPPNILLMWLEDQREVNTSGFAPARPPQP | |
| | GSTTFWAWSVLRVPAPPSPQPATYTCVVSHEDS | |
| | RTLLNASRSLEVSYVTDH | |
| IgD Hinge | RWPESPKAQASSVPTAQPQAEGSLAKATTAPATTRNTGR | 633 |
| | GGEEKKKEKEKEEQEERETKTPECPSHTQPLGVYLLTPAV | |
| | QDLWLRDKATFTCFVVGSDLKDAHLTWEVAGKVPTGGV | |
| | EEGLLERHSNGSQSQHSRLTLPRSLWNAGTSVTCTLNHPS | |
| | LPPQRLMALREPAAQAPVKLSLNLLASSDPPEAASWLLCE | |
| | VSGFSPPNILLMWLEDQREVNTSGFAPARPPPQPGSTTFW | |
| | AWSVLRVPAPPSPQPATYTCVVSHEDSRTLLNASRSLEVS | |
| | YVTDH | |
| IgG1(CH2CH3) | AEPKSPDKTHTCPPCPAPPVAGPSVFLFPPKPKDTLMIART | 2741 |
| Hinge domain | PEVTCVVVDVSHEDPEVKFNWYVDGVEVHNAKTKPREE | |
| | QYNSTYRVVSVUTVLHQDWLNGKEYKCKVSNKALPAPIE | |
| | KTISKAKGQPREPQVYTLPPSRDELTKNQVSLTCLVKGFY | |
| | PSDIAVEWESNGQPENNYKTTPPVLDSDGSFFLYSKLTVD | |
| | KSRWQQGNVFSCSVMHEALHNHYTQKSLSLSPGKKD | |
| IgG1(CH2CH3) | AEPKSPDKTHTCPPCPAPPVAGPSVFLFPPKPKDTLMIART | 635 |
| Hinge domain | PEVTCVVVDVSHEDPEVKFNWYVDGVEVHNAKTKPREE | |
| | QYNSTYRVVSVLTVLHQDWLNGKEYKCKVSNKALPAPIE | |
| | KTISKAKGQPREPQVYTLPPSRDELTKNQVSLTCLVKGFY | |
| | PSDIAVEWESNGQPENNYKTTPPVLDSDGSFFLYSKLTVD | |
| | KSRWQQGNVFSCSVMHEALHNHYTQKSLSLSPGKKD | |
| IgG1 Hinge | AEPKSPDKTHTCPPCPKDPK | 636 |
| IgG1 Hinge | EPKSCDKTHTCPPCP | 637 |
| IgG1 Hinge | EPKSPDKTHTCPPCPAPPVAGPSVFLFPPKPKDTLMIARTP | 638 |
| | EVTCVVVDVSHEDPEVKFNWYVDGVEVHNAKTKPREEQ | |
| | YNSTYRVVSVLTVLHQDWLNGKEVKCKVSNKALPAPIEK | |
| | TISKAKGQPREPQVYTLPPSRDELTKNQVSLTCLVKGFYPS | |
| | DIAVEWESNGQPENNYKTTPPVLDSDGSFFLVSKLTVDKS | |
| | RWQQGNVFSCSVMHEALHNHYTQKSLSLSPGKKD | |
| IgG1 Hinge | SVFLFPPKPKDTL | 639 |
| IgG1 Hinge | EPKSPDKTHTCPPCPAPPVAGPSVFLFPPKPKDTLMIARTP | 640 |
| | EVTCVVVDVSHEDPEVKFNWYVDGVEVHNAKTKPREEQ | |
| | YNSTYRVVSVLTVLHQDWLNGKEYKCKVSNKALPAPIEK | |
| | TISKAKGQPREPQVYTLPPSRDELTKNQVSLTCLVKGFYPS | |
| | DIAVEWESNGQPENNYKTTPPVLDSDGSFFLYSKLTVDKS | |
| | RWQQGNVFSCSVMHEALHNHYTQKSLSLSPGK | |
| IgG1 Hinge | EPKSPDKTHTCPPCPAPPVAGPSVFLFPPKPKDTLMIARTP | 641 |
| | EVTCVVVDVSHEDPEVKFNWYVDGVEVHNAKTKPREEQ | |
| | YNSTYRVVSVLTVLHQDWLNGKEYKCKVSNKALPAPIEK | |
| | TISKAKGQPREPQVYTLPPSRDELTKNQVSLTCLVKGFYPS | |
| | DIAVEWESNGQPENNYKTTPPVLDSDGSFFLYSKLTVDKS | |
| | RWQQGNVFSCSVMHEALHNHYTQKSLSLSPGKKDPK | |
| IgG1 Hinge | VECPPCPAPPVAGPSVFLFPPKPKDTLMISRRPEVTCVVVD | 642 |
| | VSHEDPEVKFNWYVDGVEVHNAKTKPREEQYNSTYRVV | |
| | SVLTVLHQDWLNGKEYKCKVSNKGLPSSIEKTISKAKGQP | |
| | REPQVYTLPPSREEMTKNQVSLTCLVKGFYPSDIAVEWES | |
| | NGQPENNYKTTPPVLDSDGSFFLYSKLTVDKSRWQQGNV | |
| | FSCSVMHEALHNHYTQKSLSLSPGK | |
| IgG1 Hinge | DPAEPKSPDKTHTCPPCPAPPVAGPSVFLFPPKPKDTLMIA | 643 |
| (CH2CH3 | RTPEVTCVVVDVSHEDPEVKFNWYVDGVEVHNAKTKPR | |
| domain) | EEQYNSTYRVVSVLTVLHQDWLNGKEYKCKVSNKALPA | |
| | PIEKTISKAKGQPREPQVYTLPPSRDELTKNQVSLTCLVKG | |
| | FYPSDIAVEWESNGQPENNYKTTPPVLDSDGSFFLYSKLT | |
| | VDKSRWQQGNVFSCSVMHEALHNHYTQKSLSLSPGKK | |
| IgG2 Hinge | ERKCCVECPPCP | 644 |
| IgG3 Hinge | ELKTPLGDTTHTCPRCP | 645 |
| IgG3 Hinge | ELKTPLGDTHTCPRCPEPKSCDTPPPCPRCPEPKSCDTPPPC | 646 |
| | PRCPEPKSCDTPPPCPRCP | |
| IgG4(CH2 and | ESKYGPPCPPCPAPEFLGGPSVFLFPPKPKDTLMISRTPEVT | 647 |
| CH3) | CVVVDVSQEDPEVQFNWYVDGVEVHNAKTKPREEQFNS | |
| | TYRVVSVLTVLHQDWLNGKEYKCKVSNKGLPSSIEKTISK | |
| | AKGQPREPQVYTLPPSQEEMTKNQVSLTCLVKGFYPSDIA | |
| | VEWESNGQPENNYKTTPPVLDSDGSFFLYSRLTVDKSRW | |
| | QEGNVFSCSVMHEALHNHYTQKSLSLSLGKM | |
| IgG4(CH2 and | ESKYGPPCPPCPAPEFEGGPSVFLFPPKPKDTLMISRTPEVT | 648 |
| CH3) | CVVVDVSQEDPEVQFNWYVDGVEVHNAKTKPREEQFQS | |
| | TYRVVSVLTVLHQDWLNGKEYKCKVSNKGLPSSIEKTISK | |
| | AKGQPREPQVYTLPPSQEEMTKNQVSLTCLVKGFYPSDIA | |
| | VEWESNGQPENNYKTTPPVLDSDGSFFLYSRLTVDKSRW | |
| | QEGNVFSCSVMHEALHNHYTQKSLSLSLGKM | |
| IgG4 Hinge | SPNMVPHAHHAQ | 649 |
| IgG4 Hinge | GQPREPQVYTLPPSQEEMTKNQVSLTCLVKGFYPSDIAVE | 650 |
| | WESNGQPENNYKTTPPVLDSDGSFFLYSRLTVDKSRWQE | |
| | GNVFSCSVMHEALHNHYTQKSLSLSLGK | |
| IgG4 Hinge | ESKYGPPCPPCPGGGSSGGGSGGQPREPQVYTLPPSQEEM | 651 |
| | TKNQVSLTCLVKGFYPSDIAVEWESNGQPENNYKTTPPVL | |
| | DSDGSFFLYSRLTVDKSRWQEGNVFSCSVMHEALHNHYT | |
| | QKSLSLSLGK | |
| IgG4 Hinge | ESKYGPPCPSCPAPEFEGGPSVFLFPPKPKDTLMISRTPEVT | 652 |
| | CVVVDVSQEDPEVQFNWYVDGVEVHQAKTKPREEQFNS | |
| | TYRVVSVLTVLHQDWLNGKEYKCKVSNKGLPSSIEKTISK | |
| | AKGQPREPQVYTLPPSQEEMTKNQVSLTCLVKGFVPSDIA | |
| | VEWESNGQPENNYKTTPPVLDSDGSFFLYSRLTVDKSRW | |
| | QEGNVFSCSVMHEALHNHYTQKSLSLSLGK | |
| IgG4 Hinge | ESKYGPPCPPCPAPEFEGGPSVFLFPPKPKDTLMISRTPEVT | 653 |
| | CVVVDVSQEDPEVQFNWYVDGVEVHQAKTKPREEQFNS | |
| | TYRVVSVLTVLHQDWLNGKEYKCKVSNKGLPSSIEKTISK | |
| | AKGQPREPQVYTLPPSQEEMTKNQVSLTCLVKGFVPSDIA | |
| | VEWESNGQPENNYKTTPPVLDSDGSFFLYSRLTVDKSRW | |
| | QEGNVFSCSVMHEALHNHYTQKSLSLSLGK | |
| IgG4 Hinge | ESKYGPPCPPCPAPEFLGGPSVFLFPPKPKDTLMISRTPEVT | 654 |
| | CVVVDVSQEDPEVQFNWYVDGVEVHNAKTKPREEQFNS | |
| | TYRVVSVLTVLHQDWLNGKEYKCKVSNKGLPSSIEKTISK | |
| | AKGQPREPQVYTLPPSQEEMTKNQVSLTCLVKGFYPSDIA | |
| | VEWESNGQPENNYKTTPPVLDSDGSFFLYSRLTVDKSRW | |
| | QEGNVFSCSVMHEALHNHYTQKSLSLSLGKM | |
| IgG4 Hinge | GAATCTAAGTACGGACCGCCCTGCCCCCCTTGCCCT | 655 |
| IgG4 Hinge | ESKYGPPCPPCP | 656 |
| IgG4 Hinge | ESKYGPPCPPCPGQPREPQVYTLPPSQEEMTKNQVSLTCL | 657 |
| | VKGFYPSDIAVEWESNGQPENNYKTTPPVLDSDGSFFLYS | |
| | RLTVDKSRWQEGNVFSCSVMHEALHNHYTQKSLSLSLGK | |
| IgG4 Hinge | ESKYGPPCPPCPAPEFLGGPSVFLFPPKPKDTLMISRTPEVT | 658 |
| | CVVVDVSQEDPEVQFNWYVDGVEVHNAKTKPREEQFNS | |
| | TYRVVSVLTVLHQDWLNGKEYKCKVSNKGLPSSIEKTISK | |
| | AKGQPREPQVYTLPPSQEEMTKNQVSLTCLVKGFYPSDIA | |
| | VEWESNGQPENNYKTTPPVLDSDGSFFLYSRLTVDKSRW | |
| | QEGNVFSCSVMHEALHNHYTQKSLSLSLGK | |
| IgG4 Hinge | ESKYGPPCPPCPAPEFLGGPSVFLFPPKPKDTLMISRTPEVT | 659 |
| | CVVVDVSQEDPEVQFNWYVDGVEVHNAKTKPREEQFNS | |
| | TYRVVSVLTVLHQDWLNGKEYKCKVSNKGLPSSIEKTISK | |
| | AKGQPREPQVYTLPPSQEEMTKNQVSLTCLVKGFYPSDIA | |
| | VEWESNGQPENNYKTTPPVLDSDGSFFLYSRLTVDKSRW | |
| | QEGNVFSCSVMHEALHNHYTQKSLSLSLGK | |
| IgG4 Hinge | ESKYGPPCPPCP | 660 |
| IgG4 Hinge | YGPPCPPCP | 661 |
| IgG4 Hinge | KYGPPCPPCP | 662 |
| IgG4 Hinge | EVVKYGPPCPPCP | 663 |
| IgG4 Hinge | ESKYGPPCPSCPAPEFLGGPSVFLFPPKPKDTLMISRTPEVT | 664 |
| | CVVVDVSQEDPEVQFNWYVDGVEVHNAKTKPREEQFNS | |
| | TYRVVSVLTVLHQDWLNGKEYKCKVSNKGLPSSIEKTISK | |
| | AKGQPREPQVYTLPPSQEEMTKNQVSLTCLVKGFYPSDIA | |
| | VEWESNGQPENNYKTTPPVLDSDGSFFLYSRLTVDLSRW | |
| | QEGNVFSCSVMHEALHNHYTQKSLSLSLGK | |
| IgG4 Hinge and | ESKYGPPCPPCPGGGSSGGGSG | 665 |
| Linker | | |
| lgGl Hinge | EPKSPDKTHTCPPCPAPPVAGPSVFLFPPKPKDTLMIARTP | 666 |
| | EVTCVVVDVSHEDPEVKFNWYVDGVEVHNAKTKPREEQ | |
| | YNSTYRVVSVLTVLHQDWLNGKEYKCKVSNKALPAPIEK | |
| | TISKAKGQPREPQVYTLPPSRDELTKNQVSLTCLVKGFYPS | |
| | DIAVEWESNGQPENNYKTIPPVLDSDGSFFLYSKLTVDKS | |
| | RWQQGNVFSCSVMHEALHNHYTQKSLSLSPGK | |
| IgGl Hinge | EPKSPDKTHTCPPCPAPPVAGPSVFLFPPKPKDTLMIARTP | 667 |
| | EVTCVVVDVSHEDPEVKFNWYVDGVEVHNAKTKPREEQ | |
| | YNSTYRVVSVLTVLHQDWLNGKEYKCKVSNKALPAPIEK | |
| | TISKAKGQPREPQVYTLPPSRDELTKNQVSLTCLVKGFYPS | |
| | DIAVEWESNGQPENNYKTIPPVLDSDGSFFLYSKLTVDKS | |
| | RWQQGNVFSCSVMHEALHNHYTQKSLSLSPGK | |
| lgGl Hinge | EPKSPDKTHTCPPCPAPPVAGPSVFLFPPKPKDTLMIARTP | 668 |
| | EVTCVVVDVSHEDPEVKFNWYVDGVEVHNAKTKPREEQ | |
| | YNSTYRVVSVLTVLHQDWLNGKEYKCKVSNKALPAPIEK | |
| | TISKAKGQPREPQVYTLPPSRDELTKNQVSLTCLVKGFYPS | |
| | DIAVEWESNGQPENNYKTTPPVLDSDGSFFLYSKLTVDKS | |
| | RWQQGNVFSCSVMHEALHNHYTQKSLSLSPGK | |
| CH2CH3 spacer | EPKSCDKTHTCPPCPAPELLGGPSVFLFPPKPKDTLMISRTP | 1145 |
| domain | EVTCVVVDVSHEDPEVKFNWYVDGVEVHNAKTKPREEQ | |
| | YNSTYRVVSVLTVLHQDWLNGKEYKCKVSNKALPAPIEK | |
| | TISKAKGQPREPQVYTLPPSRDELTKNQVSLTCLVKGFYPS | |
| | DIAVEWESNGQPENNYKTTPPVLDSDGSFFLYSKLTVDKS | |
| | RWQQGNVFSCSVMHEALHNHYTQKSLSLSPGKKDPK | |

[0545] Hinge and transmembrane region sequences useful in the present invention are provided in Table 17.

TABLE 17
Hinge and Transmembrane regions

| | | SEQ ID |
|---|---|---|
| Hinge Domain | Amino Acid Sequence | NO. |
| CD8a Transmembrane | TTPAPRPPTPAPTIASQPLSLRPEACRPAAGGAVHTRGLDF | 1349 |
| and Hinge | ACDIYIWAPLAGTCGVLLLSLVITLYC | |
| CD8a Transmembrane | DIQMTQSSSYLSVSLGGRVTITCKASDHINNWLAWYQQK | 1350 |
| and Hinge | PGNAPRLLISGATSLETGVPSRFSGSGSGKDYTLSITSLQTE | |
| | DVATYYCQQYWSTPFTFGSGTKLEIKGGGGSGGGGSGGG | |
| | GSQVQLKESGPGLVAPSQSLSITSTVSGFSLSRYSVHWVR | |
| | QPPGKGLEWLGMIWGGGSTDYNSALKSRLSISKDNSKSQ | |
| | VFLKMNSLQTDDTAMYYCARNEGDTTAGTWFAYWGQG | |
| | TLVTVSS | |
| CD8a Transmembrane | ALSNSIMYFSHFVPVFLPAKPTTTPAPRPPTPAPTIASQPLS | 1351 |
| and Hinge | LRPEACRPAAGGAVHTRGLD | |
| CD8a Transmembrane | TTTPAPRPPTPAPTIASQPLSLRPEACRPAAGGAVHTRGLD | 1352 |
| and Hinge | FACDIYIWAPLAGTCGVLLLSLVITLY | |
| CD8a Transmembrane | KPTTTPAPRPPTPAPTIASQPLSLRPEACRPAAGGAVHTRG | 1353 |
| and Hinge | LDFACDIYIWAPLAGTCGVLLLSLVITLY | |

[0546] In some embodiments, the CAR of the present invention may comprise one or more linkers between any of the domains of the CAR. The linker may be between 1-30 amino acids long. In this regard, the linker may be 1, 2, 3, 4, 5, 6, 7, 8, 9, 10, 11, 12, 13, 14, 15, 16, 17, 18, 19, 20, 21, 22, 23, 24, 25, 26, 27, 28, 29 or 30 amino acids in length. In other embodiments, the linker may be flexible.

[0547] In some embodiments, the CH2CH3 may be preferentially excluded from the chimeric antigen structure to elicit a higher TNFa response as disclosed in WO2016149578 (the contents of which are herein incorporated by reference). In some constructs a CH2CH3 structural domain is included. This domain extends the scFV away from the plasma membrane extracellular surface, and allows for the efficient detection of transduced T cells with anti-IgG Fc-specific antibody. CAR constructs which include CH2CH3 domain are disclosed in WO2015069922A3 (the contents of which are incorporated herein by reference in its entirety).

[0548] In some embodiments, the components including the targeting moiety, transmembrane domain and intracellular signaling domains of the present invention may be constructed in a single fusion polypeptide. The fusion polypeptide may be the payload of an effector module of the invention. In some embodiments, more than one CAR fusion polypeptides may be included in an effector module, for example, two, three or more CARs may be included in the effector module under the control of a single SRE (e.g., a DD). Representative effector modules comprising the CAR payload are illustrated in FIG. 2-FIG. 6.

[0549] In some embodiments, the CAR sequences may be selected from Table 18.

TABLE 18
CAR sequences

| | SEQ | |
|---|---|---|
| | ID | |
| Description | NO | Source |
| CD19 CAR | 4864 | SEQ ID NO: 12 in U.S. Pat. No. 9,499,629B2 |
| CD19 CAR | 4865 | SEQ ID NO: 24 in US20160333108A1 |
| CD19 CAR | 4866 | SEQ ID NO: 25 in US20160333108A1 |
| CD19 CAR | 4867 | SEQ ID NO: 26 in US20160333108A1 |
| CD19 CAR | 4868 | SEQ ID NO: 27 in US20160333108A1 |
| CD19 CAR | 4869 | SEQ ID NO: 1 in EP2997134A4 |
| CD19 CAR | 4870 | SEQ ID NO: 19 in EP3071687A1 |
| CD19 CAR | 4871 | SEQ ID NO: 20 in EP3071687A1 |
| CD19 CAR | 4872 | SEQ ID NO: 181 in WO2016168773A3 |
| CD19 CAR | 4873 | SEQ ID NO: 2 in WO2015157399A9 |
| CD19 CAR | 4874 | SEQ ID NO: 56 in WO2016174409A1 |
| CD19 CAR | 4875 | SEQ ID NO: 62 in WO2016174409A1 |
| CD19 CAR | 4876 | SEQ ID NO: 145 in WO2016179319A1 |
| CD19 CAR | 4877 | SEQ ID NO: 293 in US20160311907A1 |
| CD19 CAR | 4878 | SEQ ID NO: 294 in US20160311907A1 |
| CD19 CAR | 4879 | SEQ ID NO: 295 in US20160311907A1 |
| CD19 CAR | 4880 | SEQ ID NO: 296 in US20160311907A1 |
| CD19 CAR | 4881 | SEQ ID NO: 297 in US20160311907A1 |
| CD19 CAR | 4882 | SEQ ID NO: 298 in US20160311907A1 |
| CD19 CAR | 4883 | SEQ ID NO. 73 in WO2013176915A1 |
| CD19 CAR | 4884 | SEQ ID NO. 73 in WO2013176916A1 |
| CD19 CAR | 4885 | SEQ ID NO. 73 in US20130315884A1 |
| CD19 CAR | 4886 | SEQ ID NO. 73 in US20140134142A1 |
| CD19 CAR | 4887 | SEQ ID NO. 73 in US20150017136A1 |
| CD19 CAR | 4888 | SEQ ID NO. 73 in US20150203817A1 |
| CD19 CAR | 4889 | SEQ ID NO. 73 in US20160120905A1 |
| CD19 CAR | 4890 | SEQ ID NO. 73 in US20160120906A1 |
| CD19 CAR | 4891 | SEQ ID NO. 8 in WO2015124715 |
| CD19 CAR | 4892 | SEQ ID NO. 5 in WO2015124715 |
| CD19 CAR | 4893 | SEQ ID NO. 73 in WO2014184744 |
| CD19 CAR | 4894 | SEQ ID NO. 73 in WO2014184741 |
| CD19 CAR | 4895 | SEQ ID NO. 14 in US20160145337A1 |
| CD19 CAR | 4896 | SEQ ID NO. 15 in US20160145337A1 |
| CD19 CAR | 4897 | SEQ ID NO. 14 in WO2014184143 |
| CD19 CAR | 4898 | SEQ ID NO. 15 in WO2014184143 |
| CD19 CAR | 4899 | SEQ ID NO. 15 in WO2015075175 |
| CD19 CAR | 4900 | SEQ ID NO. 16 in WO2015075175 |
| CD19 CAR | 4901 | SEQ ID NO. 16 in US20160145337A1 |
| CD19 CAR | 4902 | SEQ ID NO. 16 in WO2014184143 |
| CD19 CAR | 4903 | SEQ ID NO 12 in WO2012079000 |
| CD19 CAR | 4904 | SEQ ID NO. 31 in WO2016164580 |
| CD19 CAR | 4905 | SEQ ID NO. 32 in WO2016164580 |
| CD19 CAR | 4906 | SEQ ID NO. 33 in WO2016164580 |
| CD19 CAR | 4907 | SEQ ID NO. 34 in WO2016164580 |
| CD19 CAR | 4908 | SEQ ID NO. 35 in WO2016164580 |
| CD19 CAR | 4909 | SEQ ID NO. 36 in WO2016164580 |
| CD19 CAR | 4910 | SEQ ID NO. 37 in WO2016164580 |
| CD19 CAR | 4911 | SEQ ID NO. 38 in WO2016164580 |
| CD19 CAR | 4912 | SEQ ID NO. 39 in WO2016164580 |
| CD19 CAR | 4913 | SEQ ID NO. 40 in WO2016164580 |
| CD19 CAR | 4914 | SEQ ID NO. 41 in WO2016164580 |
| CD19 CAR | 4915 | SEQ ID NO. 42 in WO2016164580 |
| CD19 CAR | 4916 | SEQ ID NO. 58 in WO2016164580 |
| CD19 CAR | 4917 | SEQ ID NO: 14 in US20160296563A1 |
| CD19 CAR | 4918 | SEQ ID NO: 15 in US20160296563A1 |
| CD19 CAR | 4919 | SEQ ID NO. 31 in WO2015157252 |
| CD19 CAR | 4920 | SEQ ID NO. 32 in WO2015157252 |
| CD19 CAR | 4921 | SEQ ID NO. 33 in WO2015157252 |
| CD19 CAR | 4922 | SEQ ID NO. 34 in WO2015157252 |
| CD19 CAR | 4923 | SEQ ID NO. 35 in WO2015157252 |
| CD19 CAR | 4924 | SEQ ID NO. 36 in WO2015157252 |
| CD19 CAR | 4925 | SEQ ID NO. 37 in WO2015157252 |
| CD19 CAR | 4926 | SEQ ID NO. 38 in WO2015157252 |
| CD19 CAR | 4927 | SEQ ID NO. 39 in WO2015157252 |
| CD19 CAR | 4928 | SEQ ID NO. 40 in WO2015157252 |
| CD19 CAR | 4929 | SEQ ID NO. 41 in WO2015157252 |
| CD19 CAR | 4930 | SEQ ID NO. 42 in WO2015157252 |
| CD19 CAR | 4931 | SEQ ID NO. 14 in WO2016139487 |
| CD19 CAR | 4932 | SEQ ID NO. 15 in WO2016139487 |
| CD19 CAR | 4933 | SEQ ID NO: 53 in US20160250258A1 |
| CD19 CAR | 4934 | SEQ ID NO: 54 in US20160250258A1 |
| CD19 CAR | 4935 | SEQ ID NO: 55 in US20160250258A1 |
| CD19 CAR | 4936 | SEQ ID NO: 56 in US20160250258A1 |
| CD19 CAR | 4937 | SEQ ID NO: 57 in US20160250258A1 |
| CD19 CAR | 4938 | SEQ ID NO: 58 in US20160250258A1 |
| CD19 CAR | 4939 | SEQ ID NO. 1 in WO2015187528 |
| CD19 CAR | 4940 | SEQ ID NO. 2 in WO2015187528 |
| CD19 CAR | 4941 | SEQ ID NO. 3 in WO2015187528 |
| CD19 CAR | 4942 | SEQ ID NO. 4 in WO2015187528 |
| CD19 CAR | 4943 | SEQ ID NO. 5 in WO2015187528 |
| CD19 CAR | 4944 | SEQ ID NO. 6 in WO2015187528 |
| CD19 CAR | 4945 | SEQ ID NO. 7 in WO2015187528 |
| CD19 CAR | 4946 | SEQ ID NO. 8 in WO2015187528 |
| CD19 CAR | 4947 | SEQ ID NO. 9 in WO2015187528 |
| CD19 CAR | 4948 | SEQ ID NO. 10 in WO2015187528 |
| CD19 CAR | 4949 | SEQ ID NO. 11 in WO2015187528 |
| CD19 CAR | 4950 | SEQ ID NO. 12 in WO2015187528 |
| CD19 CAR | 4951 | SEQ ID NO. 13 in WO2015187528 |
| CD19 CAR | 4952 | SEQ ID. NO. 31 in WO2015157252 |
| CD19 CAR | 4953 | SEQ ID. NO. 32 in WO2015157252 |
| CD19 CAR | 4954 | SEQ ID. NO. 33 in WO2015157252 |
| CD19 CAR | 4955 | SEQ ID. NO. 34 in WO2015157252 |
| CD19 CAR | 4956 | SEQ ID. NO. 35 in WO2015157252 |
| CD19 CAR | 4957 | SEQ ID. NO. 36 in WO2015157252 |
| CD19 CAR | 4958 | SEQ ID. NO. 37 in WO2015157252 |
| CD19 CAR | 4959 | SEQ ID. NO. 38 in WO2015157252 |
| CD19 CAR | 4960 | SEQ ID. NO. 39 in WO2015157252 |
| CD19 CAR | 4961 | SEQ ID. NO. 40 in WO2015157252 |
| CD19 CAR | 4962 | SEQ ID. NO. 41 in WO2015157252 |
| CD19 CAR | 4963 | SEQ ID. NO. 42 in WO2015157252 |
| CD19 CAR | 4964 | SEQ ID. NO. 58 in WO2015157252 |
| CD19 CAR | 4965 | SEQ ID NO. 31 in WO2014153270 |
| CD19 CAR | 4966 | SEQ ID NO. 32 in WO2014153270 |
| CD19 CAR | 4967 | SEQ ID NO. 33 in WO2014153270 |
| CD19 CAR | 4968 | SEQ ID NO. 34 in WO2014153270 |
| CD19 CAR | 4969 | SEQ ID NO. 35 in WO2014153270 |
| CD19 CAR | 4970 | SEQ ID NO. 36 in WO2014153270 |
| CD19 CAR | 4971 | SEQ ID NO. 37 in WO2014153270 |
| CD19 CAR | 4972 | SEQ ID NO. 38 in WO2014153270 |
| CD19 CAR | 4973 | SEQ ID NO. 39 in WO2014153270 |
| CD19 CAR | 4974 | SEQ ID NO. 40 in WO2014153270 |
| CD19 CAR | 4975 | SEQ ID NO. 41 in WO2014153270 |
| CD19 CAR | 4976 | SEQ ID NO. 42 in WO2014153270 |
| CD19 CAR | 4977 | SEQ ID NO. 13 in WO2016139487 |
| (Third | | |
| generation) | | |

[0550] In some embodiments, the CAR sequences may be selected from Table 19.

TABLE 19
CAR sequences

| | | | SEQ |
|---|---|---|---|
| | | | ID |
| Description | Source | Target | NO. |
| ALK CAR | SEQ ID NO. 37 in WO2015069922 | ALK | 4978 |
| ALK CAR | SEQ ID NO. 39 in WO2015069922 | ALK | 4979 |
| ALK CAR | SEQ ID NO. 41 in WO2015069922 | ALK | 4980 |
| ALK CAR | SEQ ID NO. 43 in WO2015069922 | ALK | 4981 |
| ALK CAR | SEQ ID NO. 44 in WO2015069922 | ALK | 4982 |
| ALK CAR | SEQ ID NO. 45 in WO2015069922 | ALK | 4983 |
| ALK CAR | SEQ ID NO. 46 in WO2015069922 | ALK | 4984 |
| ALK CAR | SEQ ID NO. 47 in WO2015069922 | ALK | 4985 |
| ALK CAR | SEQ ID NO. 48 in WO2015069922 | ALK | 4986 |
| ALK CAR | SEQ ID NO. 49 in WO2015069922 | ALK | 4987 |
| ALK CAR | SEQ ID NO. 50 in WO2015069922 | ALK | 4988 |
| ALK CAR | SEQ ID NO. 51 in WO2015069922 | ALK | 4989 |
| ALK CAR | SEQ ID NO. 52 in WO2015069922 | ALK | 4990 |
| ALK CAR | SEQ ID NO. 53 in WO2015069922 | ALK | 4991 |
| ALK CAR | SEQ ID NO. 54 in WO2015069922 | ALK | 4992 |
| ALK CAR | SEQ ID NO. 55 in WO2015069922 | ALK | 4993 |
| ALK CAR | SEQ ID NO. 56 in WO2015069922 | ALK | 4994 |
| ALK CAR | SEQ ID NO. 57 in WO2015069922 | ALK | 4995 |
| ALK CAR | SEQ ID NO. 58 in WO2015069922 | ALK | 4996 |
| ALK CAR | SEQ ID NO. 59 in WO2015069922 | ALK | 4997 |
| ALK CAR | SEQ ID NO. 60 in WO2015069922 | ALK | 4998 |
| ALK CAR | SEQ ID NO. 61 in WO2015069922 | ALK | 4999 |
| ALK CAR | SEQ ID NO. 62 in WO2015069922 | ALK | 5000 |
| ALK CAR | SEQ ID NO. 63 in WO2015069922 | ALK | 5001 |
| ALK CAR | SEQ ID NO. 64 in WO2015069922 | ALK | 5002 |
| ALK CAR | SEQ ID NO. 65 in WO2015069922 | ALK | 5003 |
| ALK CAR | SEQ ID NO. 66 in WO2015069922 | ALK | 5004 |
| ALK CAR | SEQ ID NO. 67 in WO2015069922 | ALK | 5005 |
| ALK CAR | SEQ ID NO. 68 in WO2015069922 | ALK | 5006 |
| ALK CAR | SEQ ID NO. 69 in WO2015069922 | ALK | 5007 |
| ALK CAR | SEQ ID NO. 70 in WO2015069922 | ALK | 5008 |
| ALK CAR | SEQ ID NO. 71 in WO2015069922 | ALK | 5009 |
| ALK CAR | SEQ ID NO. 72 in WO2015069922 | ALK | 5010 |
| ALK CAR | SEQ ID NO. 73 in WO2015069922 | ALK | 5011 |
| ALK CAR | SEQ ID NO. 74 in WO2015069922 | ALK | 5012 |
| ALK CAR | SEQ ID NO. 75 in WO2015069922 | ALK | 5013 |
| ALK CAR | SEQ ID NO. 76 in WO2015069922 | ALK | 5014 |
| ALK CAR | SEQ ID NO. 77 in WO2015069922 | ALK | 5015 |
| ALK CAR | SEQ ID NO. 78 in WO2015069922 | ALK | 5016 |
| ALK CAR | SEQ ID NO. 79 in WO2015069922 | ALK | 5017 |
| ALK CAR | SEQ ID NO. 80 in WO2015069922 | ALK | 5018 |
| ALK CAR | SEQ ID NO. 81 in WO2015069922 | ALK | 5019 |
| ALK CAR | SEQ ID NO. 82 in WO2015069922 | ALK | 5020 |
| ALK CAR | SEQ ID NO. 83 in WO2015069922 | ALK | 5021 |
| ALK CAR | SEQ ID NO. 84 in WO2015069922 | ALK | 5022 |
| ALK CAR | SEQ ID NO. 85 in WO2015069922 | ALK | 5023 |
| ALK CAR | SEQ ID NO. 86 in WO2015069922 | ALK | 5024 |
| ALK CAR | SEQ ID NO. 87 in WO2015069922 | ALK | 5025 |
| ALK CAR | SEQ ID NO. 88 in WO2015069922 | ALK | 5026 |
| ALK CAR | SEQ ID NO. 89 in WO2015069922 | ALK | 5027 |
| ALK CAR | SEQ ID NO. 90 in WO2015069922 | ALK | 5028 |
| CD22 (m971) third generation | SEQ ID NO. 22 in WO2014065961 | CD22 | 5029 |
| CAR | | | |
| CD22 (m971) third generation | SEQ ID NO. 23 in WO2014065961 | CD22 | 5030 |
| CAR | | | |
| CD22 (m971) third generation | SEQ ID NO. 24 in WO2014065961 | CD22 | 5031 |
| CAR | | | |
| CD22 (CARsHA22 28z) CAR | SEQ ID NO. 15 in WO2013059593 | CD22 | 5032 |
| CD22 (HA22 28BBz) CAR | SEQ ID NO. 16 in WO2013059593 | CD22 | 5033 |
| CD22 (HASH22 28z) CAR | SEQ ID NO. 17 in WO2013059593 | CD22 | 5034 |
| CD22 (HASH22 28BBz) CAR | SEQ ID NO. 18 in WO2013059593 | CD22 | 5035 |
| CD22 (BL22 28z) CAR | SEQ ID NO. 19 in WO2013059593 | CD22 | 5036 |
| CD22 (BL22 28BBz) CAR | SEQ ID NO. 20 in WO2013059593 | CD22 | 5037 |
| CD22 (HA22SH-CAR-second | SEQ ID NO. 32 in WO2013059593 | CD22 | 5038 |
| generation, version 2) CAR | | | |
| CD276 CAR (CD276.6 second | SEQ ID NO. 39 in WO2014160627 | CD276 | 5039 |
| generation) | | | |
| CD276 CAR (CD276.1 second | SEQ ID NO. 42 in WO2014160627 | CD276 | 5040 |
| generation, version 1) | | | |
| CD276 CAR (CD276.17 second | SEQ ID NO. 45 in WO2014160627 | CD276 | 5041 |
| generation, version 1) | | | |
| CD276 CAR (CD276.6 CAR | SEQ ID NO. 122 in WO2014160627 | CD276 | 5042 |
| second generation, version 1) | | | |
| CD276 CAR (CD276.6 CAR | SEQ ID NO. 123 in WO2014160627 | CD276 | 5043 |
| second generation, version 2) | | | |
| CD276 CAR (CD276.6 CAR | SEQ ID NO. 124 in WO2014160627 | CD276 | 5044 |
| third generation) | | | |
| CD276 CAR (CD276.1 CAR | SEQ ID NO. 125 in WO2014160627 | CD276 | 5045 |
| second generation, version 1) | | | |
| CD276 CAR (CD276.1 CAR | SEQ ID NO. 126 in WO2014160627 | CD276 | 5046 |
| second generation, version 2) | | | |
| CD276 CAR (CD276.1 CAR | SEQ ID NO. 127 in WO2014160627 | CD276 | 5047 |
| third generation) | | | |
| CD276 CAR (CD276.17 CAR | SEQ ID NO. 128 in WO2014160627 | CD276 | 5048 |
| second generation, version 1) | | | |
| CD276 CAR (CD276.17 CAR | SEQ ID NO. 129 in WO2014160627 | CD276 | 5049 |
| second generation, version 2) | | | |
| CD276 CAR (CD276.17 CAR | SEQ ID NO. 130 in WO2014160627 | CD276 | 5050 |
| third generation) | | | |
| CD 276 CAR | SEQ ID NO. 20 in WO2017044699 | CD276 | 5051 |
| CD276.MG.BB.Z CAR | SEQ ID NO. 12 in WO2017044699 | CD276 | 5052 |

[0551] In one embodiment of the present invention, the payload of the invention is a CD19 specific CAR targeting different B cell. In the context of the invention, an effector module may comprise a hDHFR DD, ecDHFR DD, or FKBP DD operably linked to a CD19 CAR fusion construct. In some instances, the promoter utilized to drive the expression of the effector module in the vector may be a CMV promoter or an EF1α. The efficiency of the promoter in driving the expression of the same construct may be compared. For example, two constructs that differ only by their promoter, CMV (in OT-CD19N-001) or EF1a promoter (in OT-CD19N-017) may be compared. The amino acid sequences of CD19 CAR constructs and its components are presented in Table 20 and Table 21. The amino acid sequences in Table 20 and/or Table 21 may comprise a stop codon which is denoted in the table with a “*k” at the end of the amino acid sequence.

TABLE 20
Sequences of components of CD19 CARs

| | | Amino | Nucleic |
|---|---|---|---|
| | | Acid SEQ | Acid SEQ |
| Description | Amino Acid Sequence | ID NO | ID NO |
| CD19 scFv | DIQMTQTTSSLSASLGDRVTISCRASQDISKYLNW | 418 | 5053, |
| | YQQKPDGTVKLLIYHTSRLHSGVPSRFSGSGSGTD | | 5054-5058 |
| | YSLTISNLEQEDIATYFCQQGNTLPYTFGGGTKLEI | | |
| | TGGGGSGGGGSGGGGSEVKLQESGPGLVAPSQSL | | |
| | SVTCTVSGVSLPDYGVSWIRQPPRKGLEWLGVIW | | |
| | GSETTYYNSALKSRLTIIKDNSKSQVFLKMNSLQT | | |
| | DDTAIYYCAKHYYYGGSYAMDYWGQGTSVTVS | | |
| | S | | |
| CD8α hinge--TM | TTTPAPRPPTPAPTIASQPLSLRPEACRPAAGGAVH | 2746 | 5059, |
| | TRGLDFACDIYIWAPLAGTCGVLLLSLVITLYC | | 5060, |
| | | | 5061-5063 |
| CD8α hinge | TTTPAPRPPTPAPTIASQPLSLRPEACRPAAGGAVH | 604 | 5064-5068 |
| | TRGLDFACD | | |
| CD3 zeta signaling | RVKFSRSADAPAYKQGQNQLYNELNLGRREEYD | 419 | 5069-5074 |
| domain | VLDKRRGRDPEMGGKPRRKNPQEGLYNELQKDK | | |
| | MAEAYSEIGMKGERRRGKGHDGLYQGLSTATKD | | |
| | TYDALHMQALPPR | | |
| 4-1BB (41BB) | KRGRKKLLYIFKQPFMRPVQTTQEEDGCSCRFPEE | 426 | 5075-5080 |
| intracellular signaling | EEGGCEL | | |
| domain | | | |
| CD8a Transmembrane | IYIWAPLAGTCGVLLLSLVITLYC | 562 | 5081-5082 |
| domain | | | |
| CD8α leader | MALPVTALLLPLALLLHAARP | 2747 | 5083-5087 |
| p40 signal sequence | MCHQQLVISWFSLVFLASPLVA | 2748 | 5088- |
| | | | 5096 |
| p40 | IWELKKDVYVVELDWYPDAPGEMVVLTCDTPEE | 2749 | 5097- |
| | DGITWTLDQSSEVLGSGKTLTIQVKEFGDAGQYT | | 5109 |
| | CHKGGEVLSHSLLLLHKKEDGIWSTDILKDQKEP | | |
| | KNKTFLRCEAKNYSGRFTCWWLTTISTDLTFSVK | | |
| | SSRGSSDPQGVTCGAATLSAERVRGDNKEYEYSV | | |
| | ECQEDSACPAAEESLPIEVMVDAVHKLKYENYTS | | |
| | SFFIRDIIKPDPPKNLQLKPLKNSRQVEVSWEYPDT | | |
| | WSTPHSYFSLTFCVQVQGKSKREKKDRVFTDKTS | | |
| | ATVICRKNASISVRAQDRYYSSSWSEWASVPCS | | |
| p35 | RNLPVATPDPGMFPCLHHSQNLLRAVSNMLQKA | 2750 | 5110-5120 |
| | RQTLEFYPCTSEEIDHEDITKDKTSTVEACLPLELT | | |
| | KNESCLNSRETSFITNGSCLASRKTSFMMALCLSSI | | |
| | YEDLKMYQVEFKTMNAKLLMDPKRQIFLDQNML | | |
| | AVIDELMQALNFNSETVPQKSSLEEPDFYKTKIKL | | |
| | CILLHAFRIRAVTIDRVMSYLNAS | | |
| IL15 | NWVNVISDLKKIEDLIQSMHIDATLYTESDVHPSC | 2751 | 5121-5125 |
| | KVTAMKCFLLELQVISLESGDASIHDTVENLIILAN | | |
| | NSLSSNGNVTESGCKECEELEEKNIKEFLQSFVHIV | | |
| | QMFINTS | | |
| IL15Ra | ITCPPPMSVEHADIWVKSYSLYSRERYICNSGFKR | 2752 | 5126-5128 |
| | KAGTSSLTECVLNKATNVAHWTTPSLKCIRDPAL | | |
| | VHQRPAPPSTVTTAGVTPQPESLSPSGKEPAASSPS | | |
| | SNNTAATTAAIVPGSQLMPSKSPSTGTTEISSHESS | | |
| | HGTPSQTTAKNWELTASASHQPPGVYPQGHSDTT | | |
| | VAISTSTVLLCGLSAVSLLACYLKSRQTPPLASVE | | |
| | MEAMEALPVTWGTSSRDEDLENCSHHL | | |
| mCherry (M1L) | LSKGEEDNMAIIKEFMRFKVHMEGSVNGHEFEIE | 2753 | 5129 |
| | GEGEGRPYEGTQTAKLKVTKGGPLPFAWDILSPQ | | |
| | FMYGSKAYVKHPADIPDYLKLSFPEGFKWERVM | | |
| | NFEDGGVVTVTQDSSLQDGEFIYKVKLRGTNFPS | | |
| | DGPVMQKKTMGWEASSERMYPEDGALKGEIKQR | | |
| | LKLKDGGHYDAEVKTTYKAKKPVQLPGAYNVNI | | |
| | KLDITSHNEDYTIVEQYERAEGRHSTGGMDELYK | | |
| IRES | — | — | 5130 |
| Linker (GGSGG) | GGSGG | 2754 | 5131-5135 |
| Linker (SG) | SG | — | AGTGGA |
| Linker ((G4S)3) | GGGGSGGGGSGGGGS | 2755 | 5136-5141 |
| Linker (GGSG) | GGSG | 2756 | 5142 |
| Linker | MLLLVTSLLLCELPHPAFLLIP | 2757 | 5143 |
| Linker (SG3-(SG4)3- | SGGGSGGGGSGGGGSGGGGSGGGSLQ | 2758 | 5144-5150 |
| SG3-SLQ) | | | |
| Modified Furin | ESRRVRRNKRSK | 2759 | 5151-5153 |
| BamHI | — | — | GGATCC |
| Spacer | — | — | 2760 |
| HA Tag | YPYDVPDYA | 3080 | 5154-5156 |
| FKBP(F36V, L106P) | GVQVETISPGDGRTFPKRGQTCVVHYTGMLEDGK | 1176 | 5157-5161 |
| | KVDSSRDRNKPFKFMLGKQEVIRGWEEGVAQMS | | |
| | VGQRAKLTISPDYAYGATGHPGIIPPHATLVFDVE | | |
| | LLKPE | | |
| FKBP(E31G, F36V, | GVQVETISPGDGRTFPKRGQTCVVHYTGMLGDG | 1177 | 5162-5167 |
| R71G, K105E) | KKVDSSRDRNKPFKFMLGKQEVIRGWEEGVAQM | | |
| | SVGQGAKLTISPDYAYGATGHPGIIPPHATLVFDV | | |
| | ELLELE | | |
| ecDHFR (Amino acid 2- | ISLIAALAVDYVIGMENAMPWNLPADLAWFKRN | 1174 | 5168-5173 |
| 159 of WT)(R12Y, | TLNKPVIMGRHTWESIGRPLPGRKNIILSSQPGTDD | | |
| Y100I) | RVTWVKSVDEAIAACGDVPEIMVIGGGRVIEQFLP | | |
| | KAQKLYLTHIDAEVEGDTHFPDYEPDDWESVFSE | | |
| | FHDADAQNSHSYCFEILERR | | |
| ecDHFR (Amino acid 2- | ISLIAALAVDHVIGMENAMPWNLPADLAWFKRN | 1175 | 5174-5176 |
| 159 of WT)(R12H, | TLNKPVIMGRHTWESIGRPLPGRKNIILSSQPGTDD | | |
| E129K) | RVTWVKSVDEAIAACGDVPEIMVIGGGRVYEQFL | | |
| | PKAQKLYLTHIDAEVEGDTHFPDYKPDDWESVFS | | |
| | EFHDADAQNSHSYCFEILERR | | |
| hDHFR (Amino acid 2- | VGSLNCIVAVSQNMGIGKNGDLPWPPLRNEFRYF | 1257 | 5177-5178 |
| 187 of WT; Y122I) | QRMTTTSSVEGKQNLVIMGKKTWFSIPEKNRPLK | | |
| | GRINLVLSRELKEPPQGAHFLSRSLDDALKLTEQP | | |
| | ELANKVDMVWIVGGSSVIKEAMNHPGHLKLFVT | | |
| | RIMQDFESDTFFPEIDLEKYKLLPEYPGVLSDVQE | | |
| | EKGIKYKFEVYEKND | | |
| hDHFR (Amino acid 2- | VGSLNCIVAVSQNMGIGKNGDLPWPPLRNEFRYF | 1252 | 5179-5182 |
| 187 of WT; Y122I, | QRMTTTSSVEGKQNLVIMGKKTWFSIPEKNRPLK | | |
| A125F) | GRINLVLSRELKEPPQGAHFLSRSLDDALKLTEQP | | |
| | ELANKVDMVWIVGGSSVIKEFMNHPGHLKLFVT | | |
| | RIMQDFESDTFFPEIDLEKYKLLPEYPGVLSDVQE | | |
| | EKGIKYKFEVYEKND | | |
| hDHFR (Amino acid 2- | VGSLNCIVAVSQNMGIGKNGDLPWPPLRNEFRYF | 1259 | 5183-5184 |
| 187 of WT; Q36K, | KRMTTTSSVEGKQNLVIMGKKTWFSIPEKNRPLK | | |
| Y122I) | GRINLVLSRELKEPPQGAHFLSRSLDDALKLTEQP | | |
| | ELANKVDMVWIVGGSSVIKEAMNHPGHLKLFVT | | |
| | RIMQDFESDTFFPEIDLEKYKLLPEYPGVLSDVQE | | |
| | EKGIKYKFEVYEKND | | |
| hDHFR (Q36F, N65F, | VGSLNCIVAVSQNMGIGKNGDLPWPPLRNEFRYF | 1253 | 5185-5188 |
| Y122I) | FRMTTTSSVEGKQNLVIMGKKTWFSIPEKFRPLKG | | |
| | RINLVLSRELKEPPQGAHFLSRSLDDALKLTEQPE | | |
| | LANKVDMVWIVGGSSVIKEAMNHPGHLKLFVTRI | | |
| | MQDFESDTFFPEIDLEKYKLLPEYPGVLSDVQEEK | | |
| | GIKYKFEVYEKND | | |

TABLE 21
Sequences of CD19 CARs

| | | Amino | Nucleic |
|---|---|---|---|
| | | Acid SEQ | Acid SEQ |
| Description | Amino Acid Sequence | ID NO | ID NO |
| OT-CD19 CAR-001 (OT- | MALPVTALLLPLALLLHAARPDIQMTQTTSSLSAS | 669 | 5190 |
| CD19c-001)(CD8a | LGDRVTISCRASQDISKYLNWYQQKPDGTVKLLI | | |
| leader -CD19 scFV- | YHTSRLHSGVPSRFSGSGSGTDYSLTISNLEQEDIA | | |
| CD8a-Tm -41BB - | TYFCQQGNTLPYTFGGGTKLEITGGGGSGGGGSG | | |
| CD3zeta - stop) | GGGSEVKLQESGPGLVAPSQSLSVTCTVSGVSLPD | | |
| | YGVSWIRQPPRKGLEWLGVIWGSETTYYNSALKS | | |
| | RLTIIKDNSKSQVFLKMNSLQTDDTAIYYCAKHY | | |
| | YYGGSYAMDYWGQGTSVTVSSTTTPAPRPPTPAP | | |
| | TIASQPLSLRPEACRPAAGGAVHTRGLDFACDIYI | | |
| | WAPLAGTCGVLLLSLVITLYCKRGRKKLLYIFKQP | | |
| | FMRPVQTTQEEDGCSCRFPEEEEGGCELRVKFSRS | | |
| | ADAPAYKQGQNQLYNELNLGRREEYDVLDKRRG | | |
| | RDPEMGGKPRRKNPQEGLYNELQKDKMAEAYSE | | |
| | IGMKGERRRGKGHDGLYQGLSTATKDTYDALHM | | |
| | QALPPR* | | |
| OT-CD19 CAR-002 (OT- | MALPVTALLLPLALLLHAARPDIQMTQTTSSLSAS | 670 | 5191 |
| CD19c-002)(CD8a | LGDRVTISCRASQDISKYLNWYQQKPDGTVKLLI | | |
| leader - CD19 scFV- | YHTSRLHSGVPSRFSGSGSGTDYSLTISNLEQEDIA | | |
| FKBP(F36V, L106P) - | TYFCQQGNTLPYTFGGGTKLEITGGGGSGGGGSG | | |
| CD8a-Tm - 41BB - | GGGSEVKLQESGPGLVAPSQSLSVTCTVSGVSLPD | | |
| CD3zeta - stop) | YGVSWIRQPPRKGLEWLGVIWGSETTYYNSALKS | | |
| | RLTIIKDNSKSQVFLKMNSLQTDDTAIYYCAKHY | | |
| | YYGGSYAMDYWGQGTSVTVSSGVQVETISPGDG | | |
| | RTFPKRGQTCVVHYTGMLEDGKKVDSSRDRNKP | | |
| | FKFMLGKQEVIRGWEEGVAQMSVGQRAKLTISPD | | |
| | YAYGATGHPGIIPPHATLVFDVELLKPETTTPAPRP | | |
| | PTPAPTIASQPLSLRPEACRPAAGGAVHTRGLDFA | | |
| | CDIYIWAPLAGTCGVLLLSLVITLYCKRGRKKLLY | | |
| | IFKQPFMRPVQTTQEEDGCSCRFPEEEEGGCELRV | | |
| | KFSRSADAPAYKQGQNQLYNELNLGRREEYDVL | | |
| | DKRRGRDPEMGGKPRRKNPQEGLYNELQKDKM | | |
| | AEAYSEIGMKGERRRGKGHDGLYQGLSTATKDT | | |
| | YDALHMQALPPR* | | |
| OT-CD19 CAR-003 (OT- | MALPVTALLLPLALLLHAARPDIQMTQTTSSLSAS | 671 | 5192 |
| CD19c-003)(CD8a | LGDRVTISCRASQDISKYLNWYQQKPDGTVKLLI | | |
| leader - CD19 scFV- | YHTSRLHSGVPSRFSGSGSGTDYSLTISNLEQEDIA | | |
| ecDHFR - CD8a-Tm - | TYFCQQGNTLPYTFGGGTKLEITGGGGSGGGGSG | | |
| 41BB - CD3zeta - stop) | GGGSEVKLQESGPGLVAPSQSLSVTCTVSGVSLPD | | |
| | YGVSWIRQPPRKGLEWLGVIWGSETTYYNSALKS | | |
| | RLTIIKDNSKSQVFLKMNSLQTDDTAIYYCAKHY | | |
| | YYGGSYAMDYWGQGTSVTVSSISLIAALAVDYVI | | |
| | GMENAMPWNLPADLAWFKRNTLNKPVIMGRHT | | |
| | WESIGRPLPGRKNIILSSQPGTDDRVTWVKSVDEA | | |
| | IAACGDVPEIMVIGGGRVIEQFLPKAQKLYLTHID | | |
| | AEVEGDTHFPDYEPDDWESVFSEFHDADAQNSHS | | |
| | YCFEILERRTTTPAPRPPTPAPTIASQPLSLRPEACR | | |
| | PAAGGAVHTRGLDFACDIYIWAPLAGTCGVLLLS | | |
| | LVITLYCKRGRKKLLYIFKQPFMRPVQTTQEEDGC | | |
| | SCRFPEEEEGGCELRVKFSRSADAPAYKQGQNQL | | |
| | YNELNLGRREEYDVLDKRRGRDPEMGGKPRRKN | | |
| | PQEGLYNELQKDKMAEAYSEIGMKGERRRGKGH | | |
| | DGLYQGLSTATKDTYDALHMQALPPR* | | |
| OT-CD19 CAR-004 (OT- | MALPVTALLLPLALLLHAARPDIQMTQTTSSLSAS | 672 | 5193 |
| CD19c-004)(CD8a | LGDRVTISCRASQDISKYLNWYQQKPDGTVKLLI | | |
| leader - CD19 scFV- | YHTSRLHSGVPSRFSGSGSGTDYSLTISNLEQEDIA | | |
| CD8a Hinge - FKBP | TYFCQQGNTLPYTFGGGTKLEITGGGGSGGGGSG | | |
| (F36V, L106P) -CD8a | GGGSEVKLQESGPGLVAPSQSLSVTCTVSGVSLPD | | |
| Transmembrane domain- | YGVSWIRQPPRKGLEWLGVIWGSETTYYNSALKS | | |
| 41BB - CD3zeta - stop) | RLTIIKDNSKSQVFLKMNSLQTDDTAIYYCAKHY | | |
| | YYGGSYAMDYWGQGTSVTVSSTTTPAPRPPTPAP | | |
| | TIASQPLSLRPEACRPAAGGAVHTRGLDFACDGV | | |
| | QVETISPGDGRTFPKRGQTCVVHYTGMLEDGKKV | | |
| | DSSRDRNKPFKFMLGKQEVIRGWEEGVAQMSVG | | |
| | QRAKLTISPDYAYGATGHPGIIPPHATLVFDVELL | | |
| | KPEIYIWAPLAGTCGVLLLSLVITLYCKRGRKKLL | | |
| | YIFKQPFMRPVQTTQEEDGCSCRFPEEEEGGCELR | | |
| | VKFSRSADAPAYKQGQNQLYNELNLGRREEYDV | | |
| | LDKRRGRDPEMGGKPRRKNPQEGLYNELQKDKM | | |
| | AEAYSEIGMKGERRRGKGHDGLYQGLSTATKDT | | |
| | YDALHMQALPPR* | | |
| OT-CD19 CAR-005 (OT- | MALPVTALLLPLALLLHAARPDIQMTQTTSSLSAS | 673 | 5194 |
| CD19c-005)(CD8a | LGDRVTISCRASQDISKYLNWYQQKPDGTVKLLI | | |
| leader - CD19 scFV- | YHTSRLHSGVPSRFSGSGSGTDYSLTISNLEQEDIA | | |
| CD8a Hinge - ecDHFR | TYFCQQGNTLPYTFGGGTKLEITGGGGSGGGGSG | | |
| (Amino acid 2-159 of | GGGSEVKLQESGPGLVAPSQSLSVTCTVSGVSLPD | | |
| WT)(R12Y, Y100I) - | YGVSWIRQPPRKGLEWLGVIWGSETTYYNSALKS | | |
| CD8a Transmembrane | RLTIIKDNSKSQVFLKMNSLQTDDTAIYYCAKHY | | |
| domain -41BB -CD3zeta - | YYGGSYAMDYWGQGTSVTVSSTTTPAPRPPTPAP | | |
| stop) | TIASQPLSLRPEACRPAAGGAVHTRGLDFACDISLI | | |
| | AALAVDYVIGMENAMPWNLPADLAWFKRNTLN | | |
| | KPVIMGRHTWESIGRPLPGRKNIILSSQPGTDDRV | | |
| | TWVKSVDEAIAACGDVPEIMVIGGGRVIEQFLPK | | |
| | AQKLYLTHIDAEVEGDTHFPDYEPDDWESVFSEF | | |
| | HDADAQNSHSYCFEILERRIYIWAPLAGTCGVLLL | | |
| | SLVITLYCKRGRKKLLYIFKQPFMRPVQTTQEEDG | | |
| | CSCRFPEEEEGGCELRVKFSRSADAPAYKQGQNQ | | |
| | LYNELNLGRREEYDVLDKRRGRDPEMGGKPRRK | | |
| | NPQEGLYNELQKDKMAEAYSEIGMKGERRRGKG | | |
| | HDGLYQGLSTATKDTYDALHMQALPPR* | | |
| OT-CD19c-006 (CD8a | MALPVTALLLPLALLLHAARPDIQMTQTTSSLSAS | 674 | 5195 |
| leader-CD19 scFV- | LGDRVTISCRASQDISKYLNWYQQKPDGTVKLLI | | |
| CD8a-Tm - 41BB - | YHTSRLHSGVPSRFSGSGSGTDYSLTISNLEQEDIA | | |
| CD3zeta -linker (GGSGG | TYFCQQGNTLPYTFGGGTKLEITGGGGSGGGGSG | | |
| (SEQ ID NO: 2729)) - | GGGSEVKLQESGPGLVAPSQSLSVTCTVSGVSLPD | | |
| ecDHFR (Amino acid 2- | YGVSWIRQPPRKGLEWLGVIWGSETTYYNSALKS | | |
| 159 of WT)(R12H, | RLTIIKDNSKSQVFLKMNSLQTDDTAIYYCAKHY | | |
| E129K) - stop) | YYGGSYAMDYWGQGTSVTVSSTTTPAPRPPTPAP | | |
| | TIASQPLSLRPEACRPAAGGAVHTRGLDFACDIYI | | |
| | WAPLAGTCGVLLLSLVITLYCKRGRKKLLYIFKQP | | |
| | FMRPVQTTQEEDGCSCRFPEEEEGGCELRVKFSRS | | |
| | ADAPAYKQGQNQLYNELNLGRREEYDVLDKRRG | | |
| | RDPEMGGKPRRKNPQEGLYNELQKDKMAEAYSE | | |
| | IGMKGERRRGKGHDGLYQGLSTATKDTYDALHM | | |
| | QALPPRGGSGGISLIAALAVDHVIGMENAMPWNL | | |
| | PADLAWFKRNTLNKPVIMGRHTWESIGRPLPGRK | | |
| | NIILSSQPGTDDRVTWVKSVDEAIAACGDVPEIMV | | |
| | IGGGRVYEQFLPKAQKLYLTHIDAEVEGDTHFPD | | |
| | YKPDDWESVFSEFHDADAQNSHSYCFEILERR* | | |
| OT-CD19c-007 (CD8a | MALPVTALLLPLALLLHAARPDIQMTQTTSSLSAS | 675 | 5196 |
| leader - CD19 scFV- | LGDRVTISCRASQDISKYLNWYQQKPDGTVKLLI | | |
| CD8a-Tm - 41BB - | YHTSRLHSGVPSRFSGSGSGTDYSLTISNLEQEDIA | | |
| CD3zeta - linker | TYFCQQGNTLPYTFGGGTKLEITGGGGSGGGGSG | | |
| (GGSGG(SEQ ID NO: | GGGSEVKLQESGPGLVAPSQSLSVTCTVSGVSLPD | | |
| 2729)) -FKBP (E31G, | YGVSWIRQPPRKGLEWLGVIWGSETTYYNSALKS | | |
| F36V, R71G, K105E) - | RLTIIKDNSKSQVFLKMNSLQTDDTAIYYCAKHY | | |
| stop) | YYGGSYAMDYWGQGTSVTVSSTTTPAPRPPTPAP | | |
| | TIASQPLSLRPEACRPAAGGAVHTRGLDFACDIYI | | |
| | WAPLAGTCGVLLLSLVITLYCKRGRKKLLYIFKQP | | |
| | FMRPVQTTQEEDGCSCRFPEEEEGGCELRVKFSRS | | |
| | ADAPAYKQGQNQLYNELNLGRREEYDVLDKRRG | | |
| | RDPEMGGKPRRKNPQEGLYNELQKDKMAEAYSE | | |
| | IGMKGERRRGKGHDGLYQGLSTATKDTYDALHM | | |
| | QALPPRGGSGGGVQVETISPGDGRTFPKRGQTCV | | |
| | VHYTGMLGDGKKVDSSRDRNKPFKFMLGKQEVI | | |
| | RGWEEGVAQMSVGQGAKLTISPDYAYGATGHPG | | |
| | IIPPHATLVFDVELLELE* | | |
| OT-CD19c-008 (CD8a | MALPVTALLLPLALLLHAARPDIQMTQTTSSLSAS | 676 | 5197 |
| leader - CD19 scFV- | LGDRVTISCRASQDISKYLNWYQQKPDGTVKLLI | | |
| CD8a-Tm -41BB - | YHTSRLHSGVPSRFSGSGSGTDYSLTISNLEQEDIA | | |
| CD3zeta - linker | TYFCQQGNTLPYTFGGGTKLEITGGGGSGGGGSG | | |
| (GGSGG(SEQ ID NO: | GGGSEVKLQESGPGLVAPSQSLSVTCTVSGVSLPD | | |
| 2729)) - hDHFR (Amino | YGVSWIRQPPRKGLEWLGVIWGSETTYYNSALKS | | |
| acid 2-187 of WT; Y122I) - | RLTIIKDNSKSQVFLKMNSLQTDDTAIYYCAKHY | | |
| stop) | YYGGSYAMDYWGQGTSVTVSSTTTPAPRPPTPAP | | |
| | TIASQPLSLRPEACRPAAGGAVHTRGLDFACDIYI | | |
| | WAPLAGTCGVLLLSLVITLYCKRGRKKLLYIFKQP | | |
| | FMRPVQTTQEEDGCSCRFPEEEEGGCELRVKFSRS | | |
| | ADAPAYKQGQNQLYNELNLGRREEYDVLDKRRG | | |
| | RDPEMGGKPRRKNPQEGLYNELQKDKMAEAYSE | | |
| | IGMKGERRRGKGHDGLYQGLSTATKDTYDALHM | | |
| | QALPPRGGSGGVGSLNCIVAVSQNMGIGKNGDLP | | |
| | WPPLRNEFRYFQRMTTTSSVEGKQNLVIMGKKT | | |
| | WFSIPEKNRPLKGRINLVLSRELKEPPQGAHFLSRS | | |
| | LDDALKLTEQPELANKVDMVWIVGGSSVIKEAM | | |
| | NHPGHLKLFVTRIMQDFESDTFFPEIDLEKYKLLP | | |
| | EYPGVLSDVQEEKGIKYKFEVYEKND* | | |
| OT-CD19c-009 (CD8a | MALPVTALLLPLALLLHAARPDIQMTQTTSSLSAS | 677 | 5198 |
| leader - CD19 scFV- | LGDRVTISCRASQDISKYLNWYQQKPDGTVKLLI | | |
| CD8a-Tm - 41BB - | YHTSRLHSGVPSRFSGSGSGTDYSLTISNLEQEDIA | | |
| CD3zeta -linker (GGSGG | TYFCQQGNTLPYTFGGGTKLEITGGGGSGGGGSG | | |
| (SEQ ID NO: 2729)) - | GGGSEVKLQESGPGLVAPSQSLSVTCTVSGVSLPD | | |
| hDHFR (Amino acid 2- | YGVSWIRQPPRKGLEWLGVIWGSETTYYNSALKS | | |
| 187 of WT; Y122I, | RLTIIKDNSKSQVFLKMNSLQTDDTAIYYCAKHY | | |
| A125F) - stop) | YYGGSYAMDYWGQGTSVTVSSTTTPAPRPPTPAP | | |
| | TIASQPLSLRPEACRPAAGGAVHTRGLDFACDIYI | | |
| | WAPLAGTCGVLLLSLVITLYCKRGRKKLLYIFKQP | | |
| | FMRPVQTTQEEDGCSCRFPEEEEGGCELRVKFSRS | | |
| | ADAPAYKQGQNQLYNELNLGRREEYDVLDKRRG | | |
| | RDPEMGGKPRRKNPQEGLYNELQKDKMAEAYSE | | |
| | IGMKGERRRGKGHDGLYQGLSTATKDTYDALHM | | |
| | QALPPRGGSGGVGSLNCIVAVSQNMGIGKNGDLP | | |
| | WPPLRNEFRYFQRMTTTSSVEGKQNLVIMGKKT | | |
| | WFSIPEKNRPLKGRINLVLSRELKEPPQGAHFLSRS | | |
| | LDDALKLTEQPELANKVDMVWIVGGSSVIKEFM | | |
| | NHPGHLKLFVTRIMQDFESDTFFPEIDLEKYKLLP | | |
| | EYPGVLSDVQEEKGIKYKFEVYEKND* | | |
| OT-CD19c-010 (CD8a | MALPVTALLLPLALLLHAARPDIQMTQTTSSLSAS | 678 | 5199 |
| leader - CD19 scFV- | LGDRVTISCRASQDISKYLNWYQQKPDGTVKLLI | | |
| CD8a-Tm - 41BB - | YHTSRLHSGVPSRFSGSGSGTDYSLTISNLEQEDIA | | |
| CD3zeta - linker | TYFCQQGNTLPYTFGGGTKLEITGGGGSGGGGSG | | |
| (GGSGG(SEQ ID NO: | GGGSEVKLQESGPGLVAPSQSLSVTCTVSGVSLPD | | |
| 2729)) -hDHFR (Amino | YGVSWIRQPPRKGLEWLGVIWGSETTYYNSALKS | | |
| acid 2-187 of WT; Q36K, | RLTIIKDNSKSQVFLKMNSLQTDDTAIYYCAKHY | | |
| Y122I) - stop) | YYGGSYAMDYWGQGTSVTVSSTTTPAPRPPTPAP | | |
| | TIASQPLSLRPEACRPAAGGAVHTRGLDFACDIYI | | |
| | WAPLAGTCGVLLLSLVITLYCKRGRKKLLYIFKQP | | |
| | FMRPVQTTQEEDGCSCRFPEEEEGGCELRVKFSRS | | |
| | ADAPAYKQGQNQLYNELNLGRREEYDVLDKRRG | | |
| | RDPEMGGKPRRKNPQEGLYNELQKDKMAEAYSE | | |
| | IGMKGERRRGKGHDGLYQGLSTATKDTYDALHM | | |
| | QALPPRGGSGGVGSLNCIVAVSQNMGIGKNGDLP | | |
| | WPPLRNEFRYFKRMTTTSSVEGKQNLVIMGKKT | | |
| | WFSIPEKNRPLKGRINLVLSRELKEPPQGAHFLSRS | | |
| | LDDALKLTEQPELANKVDMVWIVGGSSVIKEAM | | |
| | NHPGHLKLFVTRIMQDFESDTFFPEIDLEKYKLLP | | |
| | EYPGVLSDVQEEKGIKYKFEVYEKND* | | |
| OT-CD19c-011 (CD8a | MALPVTALLLPLALLLHAARPDIQMTQTTSSLSAS | 679 | 5200 |
| leader -CD19 scFV- | LGDRVTISCRASQDISKYLNWYQQKPDGTVKLLI | | |
| CD8a-Tm - 41BB - | YHTSRLHSGVPSRFSGSGSGTDYSLTISNLEQEDIA | | |
| CD3zeta -linker (GGSGG | TYFCQQGNTLPYTFGGGTKLEITGGGGSGGGGSG | | |
| (SEQ ID NO: 2729)) - | GGGSEVKLQESGPGLVAPSQSLSVTCTVSGVSLPD | | |
| hDHFR (Amino acid 2- | YGVSWIRQPPRKGLEWLGVIWGSETTYYNSALKS | | |
| 187 of WT; Q36K, N65F, | RLTIIKDNSKSQVFLKMNSLQTDDTAIYYCAKHY | | |
| Y122I) -stop) | YYGGSYAMDYWGQGTSVTVSSTTTPAPRPPTPAP | | |
| | TIASQPLSLRPEACRPAAGGAVHTRGLDFACDIYI | | |
| | WAPLAGTCGVLLLSLVITLYCKRGRKKLLYIFKQP | | |
| | FMRPVQTTQEEDGCSCRFPEEEEGGCELRVKFSRS | | |
| | ADAPAYKQGQNQLYNELNLGRREEYDVLDKRRG | | |
| | RDPEMGGKPRRKNPQEGLYNELQKDKMAEAYSE | | |
| | IGMKGERRRGKGHDGLYQGLSTATKDTYDALHM | | |
| | QALPPRGGSGGVGSLNCIVAVSQNMGIGKNGDLP | | |
| | WPPLRNEFRYFFRMTTTSSVEGKQNLVIMGKKTW | | |
| | FSIPEKFRPLKGRINLVLSRELKEPPQGAHFLSRSL | | |
| | DDALKLTEQPELANKVDMVWIVGGSSVIKEAMN | | |
| | HPGHLKLFVTRIMQDFESDTFFPEIDLEKYKLLPE | | |
| | YPGVLSDVQEEKGIKYKFEVYEKND* | | |
| OT-CD19n-012 (CD8a | MALPVTALLLPLALLLHAARPSGGVQVETISPGD | 680 | 5201 |
| leader - Linker (SG)- | GRTFPKRGQTCVVHYTGMLEDGKKVDSSRDRNK | | |
| FKBP(F36V, L106P) - | PFKFMLGKQEVIRGWEEGVAQMSVGQRAKLTISP | | |
| Furin Site -CD19 scFV- | DYAYGATGHPGIIPPHATLVFDVELLKPEESRRVR | | |
| CD8a-Tm - 41BB - | RNKRSKDIQMTQTTSSLSASLGDRVTISCRASQDIS | | |
| CD3zeta - stop) | KYLNWYQQKPDGTVKLLIYHTSRLHSGVPSRFSG | | |
| | SGSGTDYSLTISNLEQEDIATYFCQQGNTLPYTFG | | |
| | GGTKLEITGGGGSGGGGSGGGGSEVKLQESGPGL | | |
| | VAPSQSLSVTCTVSGVSLPDYGVSWIRQPPRKGLE | | |
| | WLGVIWGSETTYYNSALKSRLTIIKDNSKSQVFLK | | |
| | MNSLQTDDTAIYYCAKHYYYGGSYAMDYWGQG | | |
| | TSVTVSSTTTPAPRPPTPAPTIASQPLSLRPEACRPA | | |
| | AGGAVHTRGLDFACDIYIWAPLAGTCGVLLLSLV | | |
| | ITLYCKRGRKKLLYIFKQPFMRPVQTTQEEDGCSC | | |
| | RFPEEEEGGCELRVKFSRSADAPAYKQGQNQLYN | | |
| | ELNLGRREEYDVLDKRRGRDPEMGGKPRRKNPQ | | |
| | EGLYNELQKDKMAEAYSEIGMKGERRRGKGHDG | | |
| | LYQGLSTATKDTYDALHMQALPPR* | | |
| OT-CD19n-013 (CD8a | MALPVTALLLPLALLLHAARPSGISLIAALAVDYV | 681 | 5202 |
| leader - Linker (SG)- | IGMENAMPWNLPADLAWFKRNTLNKPVIMGRHT | | |
| ecDHFR (Amino acid 2- | WESIGRPLPGRKNIILSSQPGTDDRVTWVKSVDEA | | |
| 159 of WT)(R12Y, | IAACGDVPEIMVIGGGRVIEQFLPKAQKLYLTHID | | |
| Y100I) - Furin Site - | AEVEGDTHFPDYEPDDWESVFSEFHDADAQNSHS | | |
| CD19 scFV-CD8a-Tm - | YCFEILERRESRRVRRNKRSKDIQMTQTTSSLSAS | | |
| 41BB - CD3zeta - stop) | LGDRVTISCRASQDISKYLNWYQQKPDGTVKLLI | | |
| | YHTSRLHSGVPSRFSGSGSGTDYSLTISNLEQEDIA | | |
| | TYFCQQGNTLPYTFGGGTKLEITGGGGSGGGGSG | | |
| | GGGSEVKLQESGPGLVAPSQSLSVTCTVSGVSLPD | | |
| | YGVSWIRQPPRKGLEWLGVIWGSETTYYNSALKS | | |
| | RLTIIKDNSKSQVFLKMNSLQTDDTAIYYCAKHY | | |
| | YYGGSYAMDYWGQGTSVTVSSTTTPAPRPPTPAP | | |
| | TIASQPLSLRPEACRPAAGGAVHTRGLDFACDIYI | | |
| | WAPLAGTCGVLLLSLVITLYCKRGRKKLLYIFKQP | | |
| | FMRPVQTTQEEDGCSCRFPEEEEGGCELRVKFSRS | | |
| | ADAPAYKQGQNQLYNELNLGRREEYDVLDKRRG | | |
| | RDPEMGGKPRRKNPQEGLYNELQKDKMAEAYSE | | |
| | IGMKGERRRGKGHDGLYQGLSTATKDTYDALHM | | |
| | QALPPR* | | |
| OT-CD19n-014 (CD8a | MALPVTALLLPLALLLHAARPSGVGSLNCIVAVS | 682 | 5203 |
| leader - Linker (SG)- | QNMGIGKNGDLPWPPLRNEFRYFQRMTTTSSVEG | | |
| hDHFR (Amino acid 2- | KQNLVIMGKKTWFSIPEKNRPLKGRINLVLSRELK | | |
| 187 of WT; Y1221, | EPPQGAHFLSRSLDDALKLTEQPELANKVDMVWI | | |
| A125F) - Furin Site - | VGGSSVIKEFMNHPGHLKLFVTRIMQDFESDTFFP | | |
| CD19 scFV- CD8a-Tm - | EIDLEKYKLLPEYPGVLSDVQEEKGIKYKFEVYEK | | |
| 41BB -CD3zeta - stop) | NDESRRVRRNKRSKDIQMTQTTSSLSASLGDRVTI | | |
| | SCRASQDISKYLNWYQQKPDGTVKLLIYHTSRLH | | |
| | SGVPSRFSGSGSGTDYSLTISNLEQEDIATYFCQQG | | |
| | NTLPYTFGGGTKLEITGGGGSGGGGSGGGGSEVK | | |
| | LQESGPGLVAPSQSLSVTCTVSGVSLPDYGVSWIR | | |
| | QPPRKGLEWLGVIWGSETTYYNSALKSRLTIIKDN | | |
| | SKSQVFLKMNSLQTDDTAIYYCAKHYYYGGSYA | | |
| | MDYWGQGTSVTVSSTTTPAPRPPTPAPTIASQPLS | | |
| | LRPEACRPAAGGAVHTRGLDFACDIYIWAPLAGT | | |
| | CGVLLLSLVITLYCKRGRKKLLYIFKQPFMRPVQT | | |
| | TQEEDGCSCRFPEEEEGGCELRVKFSRSADAPAY | | |
| | KQGQNQLYNELNLGRREEYDVLDKRRGRDPEMG | | |
| | GKPRRKNPQEGLYNELQKDKMAEAYSEIGMKGE | | |
| | RRRGKGHDGLYQGLSTATKDTYDALHMQALPPR | | |
| | * | | |
| OT-CD19n-015 (CD8a | MALPVTALLLPLALLLHAARPSGVGSLNCIVAVS | 683 | 5204 |
| leader - Linker (SG)- | QNMGIGKNGDLPWPPLRNEFRYFKRMTTTSSVEG | | |
| hDHFR (Amino acid 2- | KQNLVIMGKKTWFSIPEKNRPLKGRINLVLSRELK | | |
| 187 of WT; Q36K, | EPPQGAHFLSRSLDDALKLTEQPELANKVDMVWI | | |
| Y122I) -Furin Site - | VGGSSVIKEAMNHPGHLKLFVTRIMQDFESDTFFP | | |
| CD19 scFV- CD8a-Tm - | EIDLEKYKLLPEYPGVLSDVQEEKGIKYKFEVYEK | | |
| 41BB - CD3zeta -stop) | NDESRRVRRNKRSKDIQMTQTTSSLSASLGDRVTI | | |
| | SCRASQDISKYLNWYQQKPDGTVKLLIYHTSRLH | | |
| | SGVPSRFSGSGSGTDYSLTISNLEQEDIATYFCQQG | | |
| | NTLPYTFGGGTKLEITGGGGSGGGGSGGGGSEVK | | |
| | LQESGPGLVAPSQSLSVTCTVSGVSLPDYGVSWIR | | |
| | QPPRKGLEWLGVIWGSETTYYNSALKSRLTIIKDN | | |
| | SKSQVFLKMNSLQTDDTAIYYCAKHYYYGGSYA | | |
| | MDYWGQGTSVTVSSTTTPAPRPPTPAPTIASQPLS | | |
| | LRPEACRPAAGGAVHTRGLDFACDIYIWAPLAGT | | |
| | CGVLLLSLVITLYCKRGRKKLLYIFKQPFMRPVQT | | |
| | TQEEDGCSCRFPEEEEGGCELRVKFSRSADAPAY | | |
| | KQGQNQLYNELNLGRREEYDVLDKRRGRDPEMG | | |
| | GKPRRKNPQEGLYNELQKDKMAEAYSEIGMKGE | | |
| | RRRGKGHDGLYQGLSTATKDTYDALHMQALPPR | | |
| | * | | |
| OT-CD19-056 (CD8a | MALPVTALLLPLALLLHAARPDIQMTQTTSSLSAS | 684 | 5205 |
| leader - CD19 scFV- | LGDRVTISCRASQDISKYLNWYQQKPDGTVKLLI | | |
| CD8a-Tm - 41BB - | YHTSRLHSGVPSRFSGSGSGTDYSLTISNLEQEDIA | | |
| CD3zeta - linker | TYFCQQGNTLPYTFGGGTKLEITGGGGSGGGGSG | | |
| (GGSGG(SEQ ID NO: | GGGSEVKLQESGPGLVAPSQSLSVTCTVSGVSLPD | | |
| 2729)) - hDHFR (Amino | YGVSWIRQPPRKGLEWLGVIWGSETTYYNSALKS | | |
| acid 2-187 of WT; Y122I) - | RLTIIKDNSKSQVFLKMNSLQTDDTAIYYCAKHY | | |
| stop) | YYGGSYAMDYWGQGTSVTVSSTTTPAPRPPTPAP | | |
| | TIASQPLSLRPEACRPAAGGAVHTRGLDFACDIYI | | |
| | WAPLAGTCGVLLLSLVITLYCKRGRKKLLYIFKQP | | |
| | FMRPVQTTQEEDGCSCRFPEEEEGGCELRVKFSRS | | |
| | ADAPAYKQGQNQLYNELNLGRREEYDVLDKRRG | | |
| | RDPEMGGKPRRKNPQEGLYNELQKDKMAEAYSE | | |
| | IGMKGERRRGKGHDGLYQGLSTATKDTYDALHM | | |
| | QALPPRGGSGGVGSLNCIVAVSQNMGIGKNGDLP | | |
| | WPPLRNEFRYFQRMTTTSSVEGKQNLVIMGKKT | | |
| | WFSIPEKNRPLKGRINLVLSRELKEPPQGAHFLSRS | | |
| | LDDALKLTEQPELANKVDMVWIVGGSSVIKEAM | | |
| | NHPGHLKLFVTRIMQDFESDTFFPEIDLEKYKLLP | | |
| | EYPGVLSDVQEEKGIKYKFEVYEKND* | | |
| OT-CD19-057 (CD8a | MALPVTALLLPLALLLHAARPDIQMTQTTSSLSAS | 685 | 5206 |
| leader -CD19 scFV- | LGDRVTISCRASQDISKYLNWYQQKPDGTVKLLI | | |
| CD8a-Tm - 41BB - | YHTSRLHSGVPSRFSGSGSGTDYSLTISNLEQEDIA | | |
| CD3zeta - BamHI(GS)- | TYFCQQGNTLPYTFGGGTKLEITGGGGSGGGGSG | | |
| stop) | GGGSEVKLQESGPGLVAPSQSLSVTCTVSGVSLPD | | |
| | YGVSWIRQPPRKGLEWLGVIWGSETTYYNSALKS | | |
| | RLTIIKDNSKSQVFLKMNSLQTDDTAIYYCAKHY | | |
| | YYGGSYAMDYWGQGTSVTVSSTTTPAPRPPTPAP | | |
| | TIASQPLSLRPEACRPAAGGAVHTRGLDFACDIYI | | |
| | WAPLAGTCGVLLLSLVITLYCKRGRKKLLYIFKQP | | |
| | FMRPVQTTQEEDGCSCRFPEEEEGGCELRVKFSRS | | |
| | ADAPAYKQGQNQLYNELNLGRREEYDVLDKRRG | | |
| | RDPEMGGKPRRKNPQEGLYNELQKDKMAEAYSE | | |
| | IGMKGERRRGKGHDGLYQGLSTATKDTYDALHM | | |
| | QALPPRGS* | | |
| OT-CD19-058 (CD8a | MALPVTALLLPLALLLHAARPDIQMTQTTSSLSAS | 686 | 5207 |
| leader -CD19 scFV- | LGDRVTISCRASQDISKYLNWYQQKPDGTVKLLI | | |
| CD8a-Tm - 41BB - | YHTSRLHSGVPSRFSGSGSGTDYSLTISNLEQEDIA | | |
| CD3zeta - p2A - BamHI | TYFCQQGNTLPYTFGGGTKLEITGGGGSGGGGSG | | |
| (GS)- stop) | GGGSEVKLQESGPGLVAPSQSLSVTCTVSGVSLPD | | |
| | YGVSWIRQPPRKGLEWLGVIWGSETTYYNSALKS | | |
| | RLTIIKDNSKSQVFLKMNSLQTDDTAIYYCAKHY | | |
| | YYGGSYAMDYWGQGTSVTVSSTTTPAPRPPTPAP | | |
| | TIASQPLSLRPEACRPAAGGAVHTRGLDFACDIYI | | |
| | WAPLAGTCGVLLLSLVITLYCKRGRKKLLYIFKQP | | |
| | FMRPVQTTQEEDGCSCRFPEEEEGGCELRVKFSRS | | |
| | ADAPAYKQGQNQLYNELNLGRREEYDVLDKRRG | | |
| | RDPEMGGKPRRKNPQEGLYNELQKDKMAEAYSE | | |
| | IGMKGERRRGKGHDGLYQGLSTATKDTYDALHM | | |
| | QALPPRGATNFSLLKQAGDVEENPGPGS* | | |
| OT-CD19-059 (CD8a | MALPVTALLLPLALLLHAARPYPYDVPDYADIQM | 687 | 5208 |
| leader - HA Tag - CD19 | TQTTSSLSASLGDRVTISCRASQDISKYLNWYQQK | | |
| scFV- CD8a-Tm - 41BB - | PDGTVKLLIYHTSRLHSGVPSRFSGSGSGTDYSLTI | | |
| CD3zeta - BamHI(GS)- | SNLEQEDIATYFCQQGNTLPYTFGGGTKLEITGGG | | |
| stop) | GSGGGGSGGGGSEVKLQESGPGLVAPSQSLSVTC | | |
| | TVSGVSLPDYGVSWIRQPPRKGLEWLGVIWGSET | | |
| | TYYNSALKSRLTIIKDNSKSQVFLKMNSLQTDDTA | | |
| | IYYCAKHYYYGGSYAMDYWGQGTSVTVSSTTTP | | |
| | APRPPTPAPTIASQPLSLRPEACRPAAGGAVHTRG | | |
| | LDFACDIYIWAPLAGTCGVLLLSLVITLYCKRGRK | | |
| | KLLYIFKQPFMRPVQTTQEEDGCSCRFPEEEEGGC | | |
| | ELRVKFSRSADAPAYKQGQNQLYNELNLGRREE | | |
| | YDVLDKRRGRDPEMGGKPRRKNPQEGLYNELQK | | |
| | DKMAEAYSEIGMKGERRRGKGHDGLYQGLSTAT | | |
| | KDTYDALHMQALPPRGS* | | |
| OT-CD19-060 (CD8a | MALPVTALLLPLALLLHAARPDIQMTQTTSSLSAS | 688 | 5209 |
| leader - CD19 scFV- | LGDRVTISCRASQDISKYLNWYQQKPDGTVKLLI | | |
| CD8a-Tm- 41BB - | YHTSRLHSGVPSRFSGSGSGTDYSLTISNLEQEDIA | | |
| CD3zeta - Linker (SG)- | TYFCQQGNTLPYTFGGGTKLEITGGGGSGGGGSG | | |
| Furin - BamHI(GS)- | GGGSEVKLQESGPGLVAPSQSLSVTCTVSGVSLPD | | |
| stop) | YGVSWIRQPPRKGLEWLGVIWGSETTYYNSALKS | | |
| | RLTIIKDNSKSQVFLKMNSLQTDDTAIYYCAKHY | | |
| | YYGGSYAMDYWGQGTSVTVSSTTTPAPRPPTPAP | | |
| | TIASQPLSLRPEACRPAAGGAVHTRGLDFACDIYI | | |
| | WAPLAGTCGVLLLSLVITLYCKRGRKKLLYIFKQP | | |
| | FMRPVQTTQEEDGCSCRFPEEEEGGCELRVKFSRS | | |
| | ADAPAYKQGQNQLYNELNLGRREEYDVLDKRRG | | |
| | RDPEMGGKPRRKNPQEGLYNELQKDKMAEAYSE | | |
| | IGMKGERRRGKGHDGLYQGLSTATKDTYDALHM | | |
| | QALPPRSGESRRVRRNKRSKGS* | | |
| OT-CD19-063 (CD8a | MALPVTALLLPLALLLHAARPDIQMTQTTSSLSAS | 689 | 5210 |
| leader - CD19 scFV- | LGDRVTISCRASQDISKYLNWYQQKPDGTVKLLI | | |
| CD8a-Tm - 41BB - | YHTSRLHSGVPSRFSGSGSGTDYSLTISNLEQEDIA | | |
| CD3zeta - stop) | TYFCQQGNTLPYTFGGGTKLEITGGGGSGGGGSG | | |
| | GGGSEVKLQESGPGLVAPSQSLSVTCTVSGVSLPD | | |
| | YGVSWIRQPPRKGLEWLGVIWGSETTYYNSALKS | | |
| | RLTIIKDNSKSQVFLKMNSLQTDDTAIYYCAKHY | | |
| | YYGGSYAMDYWGQGTSVTVSSTTTPAPRPPTPAP | | |
| | TIASQPLSLRPEACRPAAGGAVHTRGLDFACDIYI | | |
| | WAPLAGTCGVLLLSLVITLYCKRGRKKLLYIFKQP | | |
| | FMRPVQTTQEEDGCSCRFPEEEEGGCELRVKFSRS | | |
| | ADAPAYKQGQNQLYNELNLGRREEYDVLDKRRG | | |
| | RDPEMGGKPRRKNPQEGLYNELQKDKMAEAYSE | | |
| | IGMKGERRRGKGHDGLYQGLSTATKDTYDALHM | | |
| | QALPPR* | | |
| OT-CD19-064 (CD8a | MALPVTALLLPLALLLHAARPDIQMTQTTSSLSAS | 694-710 | 5211 |
| leader - CD19 scFV- | LGDRVTISCRASQDISKYLNWYQQKPDGTVKLLI | | |
| CD8a-Tm - 41BB - | YHTSRLHSGVPSRFSGSGSGTDYSLTISNLEQEDIA | | |
| CD3zeta - Linker (TR)- | TYFCQQGNTLPYTFGGGTKLEITGGGGSGGGGSG | | |
| HA Tag - FKBP (E31G, | GGGSEVKLQESGPGLVAPSQSLSVTCTVSGVSLPD | | |
| F36V, R71G, K105E) - | YGVSWIRQPPRKGLEWLGVIWGSETTYYNSALKS | | |
| stop-IRES- mCherry) | RLTIIKDNSKSQVFLKMNSLQTDDTAIYYCAKHY | | |
| | YYGGSYAMDYWGQGTSVTVSSTTTPAPRPPTPAP | | |
| | TIASQPLSLRPEACRPAAGGAVHTRGLDFACDIYI | | |
| | WAPLAGTCGVLLLSLVITLYCKRGRKKLLYIFKQP | | |
| | FMRPVQTTQEEDGCSCRFPEEEEGGCELRVKFSRS | | |
| | ADAPAYKQGQNQLYNELNLGRREEYDVLDKRRG | | |
| | RDPEMGGKPRRKNPQEGLYNELQKDKMAEAYSE | | |
| | IGMKGERRRGKGHDGLYQGLSTATKDTYDALHM | | |
| | QALPPRTRYPYDVPDYAGVQVETISPGDGRTFPK | | |
| | RGQTCVVHYTGMLGDGKKVDSSRDRNKPFKFML | | |
| | GKQEVIRGWEEGVAQMSVGQGAKLTISPDYAYG | | |
| | ATGHPGIIPPHATLVFDVELLELE*MHRSAAAAT*I | | |
| | PPPPPLSLPPP*RYWPKPLGIRPVCVCLYVIFHHIAV | | |
| | FWQCEGPETWPCLLDEHS*GSFPSRQRNARSVEC | | |
| | REGSSSSGSFLKTNNVCSDPLQAAEPPTWRQVPLR | | |
| | PKATCIRYTCKGGTTPVPRCELDSCGKSQMALLK | | |
| | RIQQGAEGCPEGTPLYGI*SGASVHMLYMCLVEV | | |
| | KKTSRPPEPRGRGFPLKNTMIIWPQP**ARARRIT | | |
| | WPSSRSSCASRCTWRAP*TATSSRSRARARAAPTR | | |
| | APRPPS*R*PRVAPCPSPGTSCPLSSCTAPRPT*STP | | |
| | PTSPTT*SCPSPRASSGSA**TSRTAAW*P*PRTPPC | | |
| | RTASSSTR*SCAAPTSPPTAP*CRRRPWAGRPPPSG | | |
| | CTPRTAP*RARSSRG*S*RTAATTTLRSRPPTRPRS | | |
| | PCSCPAPTTSTSSWTSPPTTRTTPSWNSTNAPRAA | | |
| | TPPAAWTSCTS* | | |
| OT-CD19-066 (CD8a | MALPVTALLLPLALLLHAARPDIQMTQTTSSLSAS | 690 | 5212 |
| leader - CD19 scFV- | LGDRVTISCRASQDISKYLNWYQQKPDGTVKLLI | | |
| CD8a-Tm - 41BB - | YHTSRLHSGVPSRFSGSGSGTDYSLTISNLEQEDIA | | |
| CD3zeta - Linker (GS)- | TYFCQQGNTLPYTFGGGTKLEITGGGGSGGGGSG | | |
| P2A peptide -mCherry | GGGSEVKLQESGPGLVAPSQSLSVTCTVSGVSLPD | | |
| (M1L) - stop) | YGVSWIRQPPRKGLEWLGVIWGSETTYYNSALKS | | |
| | RLTIIKDNSKSQVFLKMNSLQTDDTAIYYCAKHY | | |
| | YYGGSYAMDYWGQGTSVTVSSTTTPAPRPPTPAP | | |
| | TIASQPLSLRPEACRPAAGGAVHTRGLDFACDIYI | | |
| | WAPLAGTCGVLLLSLVITLYCKRGRKKLLYIFKQP | | |
| | FMRPVQTTQEEDGCSCRFPEEEEGGCELRVKFSRS | | |
| | ADAPAYKQGQNQLYNELNLGRREEYDVLDKRRG | | |
| | RDPEMGGKPRRKNPQEGLYNELQKDKMAEAYSE | | |
| | IGMKGERRRGKGHDGLYQGLSTATKDTYDALHM | | |
| | QALPPRGSGATNFSLLKQAGDVEENPGPLSKGEE | | |
| | DNMAIIKEFMRFKVHMEGSVNGHEFEIEGEGEGR | | |
| | PYEGTQTAKLKVTKGGPLPFAWDILSPQFMYGSK | | |
| | AYVKHPADIPDYLKLSFPEGFKWERVMNFEDGG | | |
| | VVTVTQDSSLQDGEFIYKVKLRGTNFPSDGPVMQ | | |
| | KKTMGWEASSERMYPEDGALKGEIKQRLKLKDG | | |
| | GHYDAEVKTTYKAKKPVQLPGAYNVNIKLDITSH | | |
| | NEDYTIVEQYERAEGRHSTGGMDELYK* | | |
| OT-CAR19-IL15-001 | MALPVTALLLPLALLLHAARPDIQMTQTTSSLSAS | 691 | 5213 |
| (CD8a leader - CD19 | LGDRVTISCRASQDISKYLNWYQQKPDGTVKLLI | | |
| scFV-CD8a-Tm - 41BB - | YHTSRLHSGVPSRFSGSGSGTDYSLTISNLEQEDIA | | |
| CD3zeta - Linker (GS)- | TYFCQQGNTLPYTFGGGTKLEITGGGGSGGGGSG | | |
| P2A - IL15 -Linker (SG3- | GGGSEVKLQESGPGLVAPSQSLSVTCTVSGVSLPD | | |
| (SG4)3-SG3 -SLQ (SEQ | YGVSWIRQPPRKGLEWLGVIWGSETTYYNSALKS | | |
| ID NO: 2730)) - IL15Ra - | RLTIIKDNSKSQVFLKMNSLQTDDTAIYYCAKHY | | |
| stop) | YYGGSYAMDYWGQGTSVTVSSTTTPAPRPPTPAP | | |
| | TIASQPLSLRPEACRPAAGGAVHTRGLDFACDIYI | | |
| | WAPLAGTCGVLLLSLVITLYCKRGRKKLLYIFKQP | | |
| | FMRPVQTTQEEDGCSCRFPEEEEGGCELRVKFSRS | | |
| | ADAPAYKQGQNQLYNELNLGRREEYDVLDKRRG | | |
| | RDPEMGGKPRRKNPQEGLYNELQKDKMAEAYSE | | |
| | IGMKGERRRGKGHDGLYQGLSTATKDTYDALHM | | |
| | QALPPRGSGATNFSLLKQAGDVEENPGPNWVNVI | | |
| | SDLKKIEDLIQSMHIDATLYTESDVHPSCKVTAMK | | |
| | CFLLELQVISLESGDASIHDTVENLIILANNSLSSNG | | |
| | NVTESGCKECEELEEKNIKEFLQSFVHIVQMFINTS | | |
| | SGGGSGGGGSGGGGSGGGGSGGGSLQITCPPPMS | | |
| | VEHADIWVKSYSLYSRERYICNSGFKRKAGTSSLT | | |
| | ECVLNKATNVAHWTTPSLKCIRDPALVHQRPAPP | | |
| | STVTTAGVTPQPESLSPSGKEPAASSPSSNNTAATT | | |
| | AAIVPGSQLMPSKSPSTGTTEISSHESSHGTPSQTT | | |
| | AKNWELTASASHQPPGVYPQGHSDTTVAISTSTV | | |
| | LLCGLSAVSLLACYLKSRQTPPLASVEMEAMEAL | | |
| | PVTWGTSSRDEDLENCSHHL* | | |
| OT-CAR19-IL15-002 | MALPVTALLLPLALLLHAARPDIQMTQTTSSLSAS | 692 | 5214 |
| (CD8a leader -CD19 | LGDRVTISCRASQDISKYLNWYQQKPDGTVKLLI | | |
| scFV-CD8a-Tm -41BB - | YHTSRLHSGVPSRFSGSGSGTDYSLTISNLEQEDIA | | |
| CD3zeta - Linker (GS)- | TYFCQQGNTLPYTFGGGTKLEITGGGGSGGGGSG | | |
| P2A - Linker | GGGSEVKLQESGPGLVAPSQSLSVTCTVSGVSLPD | | |
| (MLLLVTSLLLCELPHP | YGVSWIRQPPRKGLEWLGVIWGSETTYYNSALKS | | |
| AFLLIP)(SEQ ID NO: | RLTIIKDNSKSQVFLKMNSLQTDDTAIYYCAKHY | | |
| 2743) - IL15 - Linker | YYGGSYAMDYWGQGTSVTVSSTTTPAPRPPTPAP | | |
| (SG3-(SG4)3-SG3-SLQ | TIASQPLSLRPEACRPAAGGAVHTRGLDFACDIYI | | |
| (SEQ ID NO: 2730)) - | WAPLAGTCGVLLLSLVITLYCKRGRKKLLYIFKQP | | |
| IL15Ra - stop) | FMRPVQTTQEEDGCSCRFPEEEEGGCELRVKFSRS | | |
| | ADAPAYKQGQNQLYNELNLGRREEYDVLDKRRG | | |
| | RDPEMGGKPRRKNPQEGLYNELQKDKMAEAYSE | | |
| | IGMKGERRRGKGHDGLYQGLSTATKDTYDALHM | | |
| | QALPPRGSGATNFSLLKQAGDVEENPGPMLLLVT | | |
| | SLLLCELPHPAFLLIPNWVNVISDLKKIEDLIQSMH | | |
| | IDATLYTESDVHPSCKVTAMKCFLLELQVISLESG | | |
| | DASIHDTVENLIILANNSLSSNGNVTESGCKECEEL | | |
| | EEKNIKEFLQSFVHIVQMFINTSSGGGSGGGGSGG | | |
| | GGSGGGGSGGGSLQITCPPPMSVEHADIWVKSYS | | |
| | LYSRERYICNSGFKRKAGTSSLTECVLNKATNVA | | |
| | HWTTPSLKCIRDPALVHQRPAPPSTVTTAGVTPQP | | |
| | ESLSPSGKEPAASSPSSNNTAATTAAIVPGSQLMPS | | |
| | KSPSTGTTEISSHESSHGTPSQTTAKNWELTASAS | | |
| | HQPPGVYPQGHSDTTVAISTSTVLLCGLSAVSLLA | | |
| | CYLKSRQTPPLASVEMEAMEALPVTWGTSSRDED | | |
| | LENCSHHL* | | |
| OT-CD19-IL15-006 | MALPVTALLLPLALLLHAARPDIQMTQTTSSLSAS | 693 | 5215 |
| (CD8a leader -CD19 | LGDRVTISCRASQDISKYLNWYQQKPDGTVKLLI | | |
| scFV- CD8a-Tm - 41BB - | YHTSRLHSGVPSRFSGSGSGTDYSLTISNLEQEDIA | | |
| CD3zeta - Linker (GS)- | TYFCQQGNTLPYTFGGGTKLEITGGGGSGGGGSG | | |
| P2A - IgE Leader - IL15 - | GGGSEVKLQESGPGLVAPSQSLSVTCTVSGVSLPD | | |
| Linker (SG3 -(SG4)3- | YGVSWIRQPPRKGLEWLGVIWGSETTYYNSALKS | | |
| SG3-SLQ (SEQ ID NO: | RLTIIKDNSKSQVFLKMNSLQTDDTAIYYCAKHY | | |
| 2730)) - IL15Ra - stop) | YYGGSYAMDYWGQGTSVTVSSTTTPAPRPPTPAP | | |
| | TIASQPLSLRPEACRPAAGGAVHTRGLDFACDIYI | | |
| | WAPLAGTCGVLLLSLVITLYCKRGRKKLLYIFKQP | | |
| | FMRPVQTTQEEDGCSCRFPEEEEGGCELRVKFSRS | | |
| | ADAPAYKQGQNQLYNELNLGRREEYDVLDKRRG | | |
| | RDPEMGGKPRRKNPQEGLYNELQKDKMAEAYSE | | |
| | IGMKGERRRGKGHDGLYQGLSTATKDTYDALHM | | |
| | QALPPRGSGATNFSLLKQAGDVEENPGPMDWTW | | |
| | ILFLVAAATRVHSNWVNVISDLKKIEDLIQSMHID | | |
| | ATLYTESDVHPSCKVTAMKCFLLELQVISLESGDA | | |
| | SIHDTVENLIILANNSLSSNGNVTESGCKECEELEE | | |
| | KNIKEFLQSFVHIVQMFINTSSGGGSGGGGSGGGG | | |
| | SGGGGSGGGSLQITCPPPMSVEHADIWVKSYSLYS | | |
| | RERYICNSGFKRKAGTSSLTECVLNKATNVAHWT | | |
| | TPSLKCIRDPALVHQRPAPPSTVTTAGVTPQPESLS | | |
| | PSGKEPAASSPSSNNTAATTAAIVPGSQLMPSKSPS | | |
| | TGTTEISSHESSHGTPSQTTAKNWELTASASHQPP | | |
| | GVYPQGHSDTTVAISTSTVLLCGLSAVSLLACYLK | | |
| | SRQTPPLASVEMEAMEALPVTWGTSSRDEDLENC | | |
| | SHHL* | | |

[0552] Constructs disclosed in Table 20 which are transcriptionally controlled by a CMV promoter, in some instances may be placed under the transcriptional control of a different promoter to test the role of promoters in CD19 CAR expression. In one embodiment, the CMV promoter may be replaced by an EF1a promoter. In one embodiment, the CMV promoter of the, OT-CD19-001 construct, may be replaced to generate OT-CD19N-017 construct, with a EF1a promoter. In another embodiment, the CMV promoter of the CD19 CAR, OT-CD19 CAR-002 construct, may be replaced to generate OT-CD19N-018 construct, with a EF1a promoter. In another embodiment, the CMV promoter of the CD19 CAR, OT-CD19 CAR-003 construct, may be replaced to generate OT-CD19N-019 construct, with a EF1a promoter. In another embodiment, the CMV promoter of the CD19 CAR, OT-CD19 CAR-004 construct, may be replaced to generate OT-CD19N-020 construct, with a EF1a promoter. In another embodiment, the CMV promoter of the CD19 CAR, OT-CD19 CAR-005 construct, may be replaced to generate OT-CD19N-021 construct, with a EF1a promoter. In another embodiment, the CMV promoter of the CD19 CAR, OT-CD19 CAR-006 construct, may be replaced to generate OT-CD19N-022 construct, with a EF1a promoter. In another embodiment, the CMV promoter of the CD19 CAR, OT-CD19 CAR-007 construct, may be replaced to generate OT-CD19N-023 construct, with a EF1a promoter. In another embodiment, the CMV promoter of the CD19 CAR, OT-CD19 CAR-008 construct, may be replaced to generate OT-CD19N-024 construct, with a EF1a promoter. In another embodiment, the CMV promoter of the CD19 CAR, OT-CD19 CAR-009 construct, may be replaced to generate OT-CD19N-025 construct, with a EF1a promoter.

[0553] In one embodiment, the CAR construct comprises a CD19 scFV (e.g., CAT13.1E10 or FMC63), a CD8a spacer or transmembrane domain, and a 4-1BB and CD3ζ endodomain. These constructs with CAT13.1E10 may have increased proliferation after stimulation in vitro, increased cytotoxicity against the CD19+ targets, and increased effector and target interactions as compared to constructs with FMC63.

[0554] In some embodiments, the payloads of the present invention may be tuned using the catalytic domains of the E3 ubiquitin ligases. The catalytic domains of E3 ligases may be fused to an antibody or a fragment of the antibody. The payload is fused to the antigen recognized by the antibody or a fragment of the antibody that is fused to the E3 ligases catalytic domain. The E3 ligases useful in the present invention include, but are not limited to Ring E3 ligase, HECT E3 ligases and RBR E3 ligases. Any of the methods taught by Kanner S A et al. (2017) eLife; 6: e29744 may be useful in the present invention (the contents of which are incorporated by reference in their entirety).

[0555] In some embodiments, the payloads described herein, may be regulated by E3 ubiquitin ligases constructs. The E3 ligases constructs may comprise the catalytic domain of E3 ligases fused to an SRE and an antibody or a fragment of an antibody. The payloads are fused to the antigen recognized by the antibody or a fragment of an antibody, that is appended to the catalytic domain of E3 ligases. In the absence of the stimulus corresponding to the SRE, the E3 ubiquitin ligases constructs are destabilized, which in turn, allows the expression of the payloads fused to the antigen. In the presence of ligand corresponding to the SRE, the E3 ubiquitin ligases constructs are stabilized and available to bind to the antigen fused to the payloads. Binding of the E3 ligases constructs to the antigens, targets the protein for degradation. The E3 ubiquitin ligases constructs may be used to regulate any payload described herein, provided the payload is fused to an antigen recognized by the antibody or the fragment of the antibody in the E3 ubiquitin ligases construct. In some embodiments, the payload is a chimeric antigen receptor. The E3 ubiquitin ligases constructs may be used to design logic gates. In one embodiment, the E3 ubiquitin ligases constructs may be used to generate a NOT gate, wherein one ligand induces the expression of the payload, while another inhibits the expression of the payload. In some embodiments, the NOT gate may be generated using the E3 ubiquitin ligases constructs and by fusing the payloads-antigen fusion protein to a second a SRE that is distinct from the SRE in the E3 ubiquitin ligase construct.

[0556] In some embodiments, the payload of the invention may be any of the co-stimulatory molecules and/or intracellular domains described herein. In some embodiments, one or more co-stimulatory molecules, each under the control of different SRE may be used in the present invention. SRE regulated co-stimulatory molecules may also be expressed in conjunction with a first generation CAR, a second generation CAR, a third generation CAR, a fourth generation, or any other CAR design described herein.

[0557] In one embodiment of the present invention, the payload of the invention is a CD33 specific CAR. The CD33 heavy and light chain may be combined with any of the signal peptides, transmembrane domains, costimulatory domains, intracellular domains and destabilizing domains described herein.

[0558] In one embodiment of the present invention, the payload of the invention is a GD2 specific CAR. The GD2 heavy and light chain may be combined with any of the signal peptides, transmembrane domains, costimulatory domains, intracellular domains and destabilizing domains described herein.

[0559] In one embodiment of the present invention, the payload of the invention is a Her2 specific CAR. The Her2 heavy and light chain may be combined with any of the signal peptides, transmembrane domains, costimulatory domains, intracellular domains and destabilizing domains described herein. Exemplary BCMA CAR sequences and its components are described in Table 21. The amino acid sequences in Table 21 may comprise a stop codon which is denoted in the table with a “*k” at the end of the amino acid sequence

TABLE 21
DD-Her2 construct sequences

| | | | Nucleic |
|---|---|---|---|
| | | Amino | Acid SEQ |
| | | Acid SEQ | ID NO/ |
| Description | Amino Acid Sequence | ID NO | Sequence |
| GMCSF Leader | LLLVTSLLLCELPHPAFLLIP | 2762 | 5216 |
| Linker | ASFE | 2763 | 5217 |
| Linker | GS | — | GGTTCC |
| | | | GGATCC |
| Linker | TS | — | ACTAGT |
| Linker | HM | — | ATGCAC |
| 4-1BB | KRGRKKLLYIFKQPFMRPVQTTQEEDGCSCRFPEEEEGG | 2764 | 5218 |
| Intracellular | CEL | | |
| Domain | | | |
| 4D5 scFV | DIQMTQSPSSLSASVGDRVTITCRASQDVNTAVAWYQQ | 2765 | 5219 |
| | KPGKAPKLLIYSASFLYSGVPSRFSGSRSGTDFTLTISSLQ | | |
| | PEDFATYYCQQHYTTPPTFGQGTKVEIKGSTSGSGKPGS | | |
| | GEGSGEVQLVESGGGLVQPGGSLRLSCAASGFNIKDTYI | | |
| | HWVRQAPGKGLEWVARIYPTNGYTRYADSVKGRFTISA | | |
| | DTSKNTAYLQMNSLRAEDTAVYYCSRWGGDGFYAMD | | |
| | VWGQGTLVTVSS | | |
| CD8a Hinge | TTTPAPRPPTPAPTIASQPLSLRPEACRPAAGGAVHTRGL | 2767 | 5220 |
| | DFACD | | |
| Transmembrane | IYIWAPLAGTCGVLLLSLVITLYC | 2768 | 5221 |
| Domain | | | |
| CD3 Zeta | RVKFSRSADAPAYKQGQNQLYNELNLGRREEYDVLDK | 2769 | 5222 |
| signaling Domain | RRGRDPEMGGKPRRKNPQEGLYNELQKDKMAEAYSEI | | |
| | GMKGERRRGKGHDGLYQGLSTATKDTYDALHMQALPP | | |
| | R | | |
| hDHFR (Amino | VGSLNCIVAVSQNMGIGKNGDLPWPPLRNEFRYFQRMT | 2770 | 5223-5226 |
| acid 2-187 of WT; | TTSSVEGKQNLVIMGKKTWFSIPEKNRPLKGRINLVLSR | | |
| Y122I) | ELKEPPQGAHFLSRSLDDALKLTEQPELANKVDMVWIV | | |
| | GGSSVIKEAMNHPGHLKLFVTRIMQDFESDTFFPEIDLEK | | |
| | YKLLPEYPGVLSDVQEEKGIKYKFEVYEKND | | |
| OT-Her2-004 | MLLLVTSLLLCELPHPAFLLIPDIQMTQSPSSLSASVGDR | 1171 | 5227 |
| (Met - GMCSF | VTITCRASQDVNTAVAWYQQKPGKAPKLLIYSASFLYS | | |
| Leader - 4D5 | GVPSRFSGSRSGTDFTLTISSLQPEDFATYYCQQHYTTPP | | |
| scFv - Linker | TFGQGTKVEIKGSTSGSGKPGSGEGSGEVQLVESGGGLV | | |
| (ASFE (SEQ ID | QPGGSLRLSCAASGFNIKDTYIHWVRQAPGKGLEWVAR | | |
| NO: 3092))- | IYPTNGYTRYADSVKGRFTISADTSKNTAYLQMNSLRAE | | |
| CD8a hinge- | DTAVYYCSRWGGDGFYAMDVWGQGTLVTVSSASFETT | | |
| Linker (GS)- | TPAPRPPTPAPTIASQPLSLRPEACRPAAGGAVHTRGLDF | | |
| Transmembrane | ACDGSIYIWAPLAGTCGVLLLSLVITLYCTSKRGRKKLL | | |
| Domain - Linker | YIFKQPFMRPVQTTQEEDGCSCRFPEEEEGGCELHMRVK | | |
| (TS) - 4-1BB | FSRSADAPAYKQGQNQLYNELNLGRREEYDVLDKRRG | | |
| intracellular | RDPEMGGKPRRKNPQEGLYNELQKDKMAEAYSEIGMK | | |
| signaling domain - | GERRRGKGHDGLYQGLSTATKDTYDALHMQALPPRGS | | |
| Linker (HM) - | VGSLNCIVAVSQNMGIGKNGDLPWPPLRNEFRYFQRMT | | |
| CD3 zeta - Linker | TTSSVEGKQNLVIMGKKTWFSIPEKNRPLKGRINLVLSR | | |
| (GS) - hDHFR | ELKEPPQGAHFLSRSLDDALKLTEQPELANKVDMVWIV | | |
| (Amino acid 2- | GGSSVIKEAMNHPGHLKLFVTRIMQDFESDTFFPEIDLEK | | |
| 187 of WT; | YKLLPEYPGVLSDVQEEKGIKYKFEVYEKND* | | |
| Y122I)- stop) | | | |

[0560] In one embodiment, the CAR of the present invention is a BCMA (B-cell maturation antigen) CAR, also referred to as the CD269. The BCMA heavy and light chains may be combined with any of the signal peptides, transmembrane domains, costimulatory domains, intracellular domains and destabilizing domains described herein. Exemplary BCMA CAR sequences and its components are described in Table 22. The amino acid sequences in Table 22 may comprise a stop codon which is denoted in the table with a “*” at the end of the amino acid sequence.

TABLE 22
BCMA CAR

| | | Amino | Nucleic |
|---|---|---|---|
| | | Acid SEQ | Acid SEQ |
| Description | Amino Acid Sequence | ID NO. | ID NO. |
| BCMA scFv (C11D5.3) | DIVLTQSPASLAMSLGKRATISCRASESVSVIGAHL | 2772 | 5228 |
| | IHWYQQKPGQPPKLLIYLASNLETGVPARFSGSGSG | | |
| | TDFTLTIDPVEEDDVAIYSCLQSRIFPRTFGGGTKL | | |
| | EIKGSTSGSGKPGSGEGSTKGQIQLVQSGPELKKPG | | |
| | ETVKISCKASGYTFTDYSINWVKRAPGKGLKWMGWI | | |
| | NTETREPAYAYDFRGRFAFSLETSASTAYLQINNLK | | |
| | YEDTATYFCALDYSYAMDYWGQGTSVTVSS | | |
| CD8α hinge-TM | TTTPAPRPPTPAPTIASQPLSLRPEACRPAAGGAVH | 2773 | 5229 |
| | TRGLDFACDIYIWAPLAGTCGVLLLSLVITLYC | | |
| CD3 zeta signaling | RVKFSRSADAPAYKQGQNQLYNELNLGRREEYDVLD | 2769 | 5230 |
| domain | KRRGRDPEMGGKPRRKNPQEGLYNELQKDKMAEAYS | | |
| | EIGMKGERRRGKGHDGLYQGLSTATKDTYDALHMQA | | |
| | LPPR | | |
| 4-1BB intracellular | KRGRKKLLYIFKQPFMRPVQTTQEEDGCSCRFPEE | 2764 | 5231 |
| signaling domain | EEGGCEL | | |
| CD8α leader | MALPVTALLLPLALLLHAARP | 2766 | 5232-5237 |
| ecDHFR (Amino acid 2- | ISLIAALAVDYVIGMENAMPWNLPADLAWFKRNTL | 2774 | 5238-5244 |
| 159 of WT)(R12Y, | NKPVIMGRHTWESIGRPLPGRKNIILSSQPGTDDR | | |
| Y100I) | VTWVKSVDEAIAACGDVPEIMVIGGGRVIEQFLPK | | |
| | AQKLYLTHIDAEVEGDTHFPDYEPDDWESVFSEFH | | |
| | DADAQNSHSYCFEILERR | | |
| FKBP (E31G, F36V, | GVQVETISPGDGRTFPKRGQTCVVHYTGMLGDGKK | 2775 | 5245-5252 |
| R71G, K105E) | VDSSRDRNKPFKFMLGKQEVIRGWEEGVAQMSVGQ | | |
| | GAKLTISPDYAYGATGHPGIIPPHATLVFDVELLE | | |
| | LE | | |
| OT-BCMA-001 (CD8a | MALPVTALLLPLALLLHAARPDIVLTQSPASLAMS | 1168 | 5253 |
| leader-BCMA scFv- | LGKRATISCRASESVSVIGAHLIHWYQQKPGQPPK | | |
| CD8a hinge-Tm-4- | LLIYLASNLETGVPARFSGSGSGTDFTLTIDPVEE | | |
| 1BB intracellular domain- | DDVAIYSCLQSRIFPRTFGGGTKLEIKGSTSGSGK | | |
| CD3 zeta-stop) | PGSGEGSTKGQIQLVQSGPELKKPGETVKISCKAS | | |
| | GYTFTDYSINWVKRAPGKGLKWMGWINTETREPAY | | |
| | AYDFRGRFAFSLETSASTAYLQINNLKYEDTATYF | | |
| | CALDYSYAMDYWGQGTSVTVSSTTTPAPRPPTPAP | | |
| | TIASQPLSLRPEACRPAAGGAVHTRGLDFACDIYI | | |
| | WAPLAGTCGVLLLSLVITLYCKRGRKKLLYIFKQP | | |
| | FMRPVQTTQEEDGCSCRFPEEEEGGCELRVKFSRS | | |
| | ADAPAYKQGQNQLYNELNLGRREEYDVLDKRRGRD | | |
| | PEMGGKPRRKNPQEGLYNELQKDKMAEAYSEIGMK | | |
| | GERRRGKGHDGLYQGLSTATKDTYDALHMQALPPR* | | |
| OT-BCMA-002 (CD8a | MALPVTALLLPLALLLHAARPDIVLTQSPASLAMS | 1169 | 5254 |
| leader-BCMA scFv- | LGKRATISCRASESVSVIGAHLIHWYQQKPGQPPK | | |
| CD8a hinge-Tm-4- | LLIYLASNLETGVPARFSGSGSGTDFTLTIDPVEE | | |
| 1BB intracellular domain- | DDVAIYSCLQSRIFPRTFGGGTKLEIKGSTSGSGK | | |
| CD3 zeta-Linker (SG)- | PGSGEGSTKGQIQLVQSGPELKKPGETVKISCKAS | | |
| FKBP(E31G, F36V, | GYTFTDYSINWVKRAPGKGLKWMGWINTETREPAY | | |
| R71G, K105E)-stop) | AYDFRGRFAFSLETSASTAYLQINNLKYEDTATYF | | |
| | CALDYSYAMDYWGQGTSVTVSSTTTPAPRPPTPAP | | |
| | TIASQPLSLRPEACRPAAGGAVHTRGLDFACDIYI | | |
| | WAPLAGTCGVLLLSLVITLYCKRGRKKLLYIFKQP | | |
| | FMRPVQTTQEEDGCSCRFPEEEEGGCELRVKFSRS | | |
| | ADAPAYKQGQNQLYNELNLGRREEYDVLDKRRGRD | | |
| | PEMGGKPRRKNPQEGLYNELQKDKMAEAYSEIGMK | | |
| | GERRRGKGHDGLYQGLSTATKDTYDALHMQALPPR | | |
| | SGGVQVETISPGDGRTFPKRGQTCVVHYTGMLGDG | | |
| | KKVDSSRDRNKPFKFMLGKQEVIRGWEEGVAQMSV | | |
| | GQGAKLTISPDYAYGATGHPGIIPPHATLVFDVEL | | |
| | LELE* | | |
| OT-BCMA-003 (CD8a | MALPVTALLLPLALLLHAARPDIVLTQSPASLAMS | 1170 | 5255 |
| leader-BCMA scFv- | LGKRATISCRASESVSVIGAHLIHWYQQKPGQPPK | | |
| CD8a hinge-Tm-4- | LLIYLASNLETGVPARFSGSGSGTDFTLTIDPVEE | | |
| 1BB intracellular domain- | DDVAIYSCLQSRIFPRTFGGGTKLEIKGSTSGSGK | | |
| CD3 zeta-Linker (SG)- | PGSGEGSTKGQIQLVQSGPELKKPGETVKISCKAS | | |
| ecDHFR (Amino acid 2- | GYTFTDYSINWVKRAPGKGLKWMGWINTETREPAY | | |
| 159 of WT)(R12Y, | AYDFRGRFAFSLETSASTAYLQINNLKYEDTATYF | | |
| Y100I)-stop) | CALDYSYAMDYWGQGTSVTVSSTTTPAPRPPTPAP | | |
| | TIASQPLSLRPEACRPAAGGAVHTRGLDFACDIYI | | |
| | WAPLAGTCGVLLLSLVITLYCKRGRKKLLYIFKQP | | |
| | FMRPVQTTQEEDGCSCRFPEEEEGGCELRVKFSRS | | |
| | ADAPAYKQGQNQLYNELNLGRREEYDVLDKRRGRD | | |
| | PEMGGKPRRKNPQEGLYNELQKDKMAEAYSEIGMK | | |
| | GERRRGKGHDGLYQGLSTATKDTYDALHMQALPPR | | |
| | SGISLIAALAVDYVIGMENAMPWNLPADLAWFKRN | | |
| | TLNKPVIMGRHTWESIGRPLPGRKNIILSSQPGTD | | |
| | DRVTWVKSVDEAIAACGDVPEIMVIGGGRVIEQFL | | |
| | PKAQKLYLTHIDAEVEGDTHFPDYEPDDWESVFSE | | |
| | FHDADAQNSHSYCFEILERR* | | |

### Tandem CAR (TanCAR)

[0561] In some embodiments, the CAR of the present invention may be a tandem chimeric antigen receptor (TanCAR) which is able to target two, three, four, or more tumor specific antigens. In some aspects, The CAR is a bispecific TanCAR including two targeting domains which recognize two different TSAs on tumor cells. The bispecific CAR may be further defined as comprising an extracellular region comprising a targeting domain (e.g., an antigen recognition domain) specific for a first tumor antigen and a targeting domain (e.g., an antigen recognition domain) specific for a second tumor antigen. In other aspects, the CAR is a multispecific TanCAR that includes three or more targeting domains configured in a tandem arrangement. The space between the targeting domains in the TanCAR may be between about 5 and about 30 amino acids in length, for example, 6, 7, 8, 9, 10, 11, 12, 13, 14, 15, 16, 17, 18, 19, 20, 21, 22, 23, 24, 25, 26, 27, 28, 29 and 30 amino acids.

### Split CAR

[0562] In some embodiments, the components including the targeting moiety, transmembrane domain and intracellular signaling domains of the present invention may be split into two or more parts such that it is dependent on multiple inputs that promote assembly of the intact functional receptor. In one embodiment, the split synthetic CAR system can be constructed in which the assembly of an activated CAR receptor is dependent on the binding of a ligand to the SRE (e.g. a small molecule) and a specific antigen to the targeting moiety. As a non-limiting example, the split CAR consists of two parts that assemble in a small molecule-dependent manner; one part of the receptor features an extracellular antigen binding domain (e.g. scFv) and the other part has the intracellular signaling domains, such as the CD3ζ intracellular domain.

[0563] In other aspects, the split parts of the CAR system can be further modified to increase signal. In one example, the second part of cytoplasmic fragment may be anchored to the plasma membrane by incorporating a transmembrane domain (e.g., CD8a transmembrane domain) to the construct. An additional extracellular domain may also be added to the second part of the CAR system, for instance an extracellular domain that mediates homo-dimerization. These modifications may increase receptor output activity, i.e., T cell activation.

[0564] In some aspects, the two parts of the split CAR system contain heterodimerization domains that conditionally interact upon binding of a heterodimerizing small molecule. As such, the receptor components are assembled in the presence of the small molecule, to form an intact system which can then be activated by antigen engagement. Any known heterodimerizing components can be incorporated into a split CAR system. Other small molecule dependent heterodimerization domains may also be used, including, but not limited to, gibberellin-induced dimerization system (GID1-GAI), trimethoprim-SLF induced ecDHFR and FKBP dimerization (Czlapinski et al., J Am Chem Soc., 2008, 130(40): 13186-13187) and ABA (abscisic acid) induced dimerization of PP2C and PYL domains (Cutler et al., Annu Rev Plant Biol. 2010, 61: 651-679). The dual regulation using inducible assembly (e.g., ligand dependent dimerization) and degradation (e.g., destabilizing domain induced CAR degradation) of the split CAR system may provide more flexibility to control the activity of the CAR modified T cells.

### Switchable CAR

[0565] In some embodiments, the CAR of the invention may be a switchable CAR. Juillerat et al (Juilerat et al., Sci. Rep., 2016, 6: 18950; the contents of which are incorporated herein by reference in their entirety) recently reported controllable CARs that can be transiently switched on in response to a stimulus (e.g. a small molecule). In this CAR design, a system is directly integrated in the hinge domain that separate the scFv domain from the cell membrane domain in the CAR. Such system is possible to split or combine different key functions of a CAR such as activation and costimulation within different chains of a receptor complex, mimicking the complexity of the TCR native architecture. This integrated system can switch the scFv and antigen interaction between on/off states controlled by the absence/presence of the stimulus.

### Reversible CAR

[0566] In other embodiments, the CAR of the invention may be a reversible CAR system. In this CAR architecture, a LID domain (ligand-induced degradation) is incorporated into the CAR system. The CAR can be temporarily down-regulated by adding a ligand of the LID domain. The combination of LID and DD mediated regulation provides tunable control of continuingly activated CAR T cells, thereby reducing CAR mediated tissue toxicity.

### Activation-Conditional CAR

[0567] In some embodiments, payloads of the invention may be an activation-conditional chimeric antigen receptor, which is only expressed in an activated immune cell. The expression of the CAR may be coupled to activation conditional control region which refers to one or more nucleic acid sequences that induce the transcription and/or expression of a sequence e.g. a CAR under its control. Such activation conditional control regions may be promoters of genes that are upregulated during the activation of the immune effector cell e.g. IL2 promoter or NFAT binding sites. In some embodiments, activation of the immune cell may be achieved by a constitutively expressed CAR (International Publication No: WO2016126608; the contents of which are incorporated herein by reference in their entirety).

### 4. Immunotherapeutic Agents

[0568] In some embodiments, payloads of the present invention may be immunotherapeutic agents that induce immune responses in an organism. The immunotherapeutic agent may be a cytokine, chemokine, a cytokine receptor, a chemokine receptor, or any agent that induces an immune response. In one embodiment, the immunotherapeutic agent induces an anti-cancer immune response in a cell, or in a subject.

[0569] In some embodiments, ligands that do not affect the activity of the immune cell, and/or the chimeric antigen receptor, in the absence of the SREs may be preferably selected.

[0570] In some embodiments, the IL12 levels secreted by the immune cells of the invention may approximately be comparable to the IL12 levels secreted by human myeloid dendritic cells (mDC1), when activated with TLR agonists. In one embodiment, the TLR agonist may be the combination of lipopolysaccharide administered with R848.

[0571] In some embodiments, the IFN gamma secreted by IL12 induced activation of the immune cells is at least 5 fold greater in the presence of ligand, compared to the levels in the absence of ligand.

[0572] In some embodiments, the IFN gamma secreted by IL15 induced activation of the immune cells is at least 10-fold greater in the presence of ligand, compared to the levels in the absence of ligand.

[0573] In some embodiments, regulation of IL12 provides the necessary safety switch. In some embodiments, IL12 secretion recruit and/or activates effector cells in the tumor microenvironment. In some embodiments, the IL12 regulation provides a benefit to CAR T function without causing toxicity.

[0574] In some embodiments, regulation of IL15-IL15Ra fusion proteins provides a safety switch as compared to constitutively expressed IL15-IL15Ra. In some embodiments, IL15-IL15Ra leads to better expansion, and/or persistence of CAR T cells.

[0575] In some embodiments, payloads of the present invention may be immunotherapeutic agents that induce immune responses in an organism. The immunotherapeutic agent may be, but is not limited to a cytokine, a safety switch (e.g., a suicide gene), a regulatory switch, a chimeric antigen receptor, or any agent that induces an immune response. In one embodiment, the immunotherapeutic agent induces an anti-cancer immune response in a cell, or in a subject.

[0576] In some embodiments, the payload of the invention may be any of the co-stimulatory molecules and/or intracellular domains described herein. In some embodiments, one or more co-stimulatory molecules, each under the control of different SRE may be used in the present invention. SRE regulated co-stimulatory molecules may also be expressed in conjunction with a first generation CAR, a second generation CAR, a third generation CAR, a fourth generation, or any other CAR design described herein.

### Cytokines, Chemokines and Other Soluble Factors

[0577] In accordance with the present invention, payloads of the present invention may be cytokines, chemokines, growth factors, and soluble proteins produced by immune cells, cancer cells and other cell types, which act as chemical communicators between cells and tissues within the body. These proteins mediate a wide range of physiological functions, from effects on cell growth, differentiation, migration and survival, to a number of effector activities. For example, activated T cells produce a variety of cytokines for cytotoxic function to eliminate tumor cells.

[0578] In accordance with the present invention, CARs of the present invention may be utilized along with other payloads of the present invention may be cytokines, chemokines, growth factors, and soluble proteins produced by immune cells, cancer cells and other cell types, which act as chemical communicators between cells and tissues within the body. These proteins mediate a wide range of physiological functions, from effects on cell growth, differentiation, migration and survival, to a number of effector activities. For example, activated T cells produce a variety of cytokines for cytotoxic function to eliminate tumor cells.

[0579] In some embodiments, payloads of the present invention may be cytokines, and fragments, variants, analogs and derivatives thereof, including but not limited to interleukins, tumor necrosis factors (TNFs), interferons (IFNs), TGF beta and chemokines. In some embodiments, payloads of the present invention may be cytokines that stimulate immune responses. In other embodiments, payloads of the invention may be antagonists of cytokines that negatively impact anti-cancer immune responses.

[0580] In some embodiments, payloads of the present invention may be cytokines, and fragments, variants, analogs and derivatives thereof, including but not limited to interleukins, tumor necrosis factors (TNFs), interferons (IFNs), TGF beta and chemokines. It is understood in the art that certain gene and/or protein nomenclature for the same gene or protein may be inclusive or exclusive of punctuation such as a dash “-” or symbolic such as Greek letters. Whether these are included or excluded herein, the meaning is not meant to be changed as would be understood by one of skill in the art. For example, IL2, IL-2 and IL 2 refer to the same interleukin. Likewise, TNFalpha, TNFα, TNF-alpha, TNF-α, TNF alpha and TNF α all refer to the same protein. In some embodiments, payloads of the present invention may be cytokines that stimulate immune responses. In other embodiments, payloads of the invention may be antagonists of cytokines that negatively impact anti-cancer immune responses.

[0581] In one embodiment, the payloads of the present invention may be cytokines fused to TNF alpha ectodomain. Such payloads are produced as membrane associated cytokines fused to the TNF ectodomain. In one embodiment, the cytokine may be shed from the cell surface by the action of membrane associated proteases, and/or proteases in the extracellular space e.g. MMP9. Any of the cytokines described herein may be useful in the present invention. Such cytokine-TNF scaffold constructs may be used to preserve the native sequence of the processed cytokine while preserving regulation.

[0582] In some embodiments, payloads of the present invention may be cytokine receptors, recombinant receptors, variants, analogs and derivatives thereof; or signal components of cytokines.

[0583] In some embodiments, cytokines of the present invention may be utilized to improve expansion, survival, persistence, and potency of immune cells such as CD8+T_{EM}, natural killer cells and tumor infiltrating lymphocytes (TIL) cells used for immunotherapy. In other embodiments, T cells engineered with two or more DD regulated cytokines are utilized to provide kinetic control of T cell activation and tumor microenvironment remodeling. In one aspect, the present invention provides biocircuits and compositions to minimize toxicity related to cytokine therapy. Despite its success in mitigating tumor burden, systemic cytokine therapy often results in the development of severe dose limiting side effects. Two factors contribute to the observed toxicity (a) Pleiotropism, wherein cytokines affect different cells types and sometimes produce opposing effects on the same cells depending on the context (b) Cytokines have short serum half-life and thus need to be administered at high doses to achieve therapeutic effects, which exacerbates the pleiotropic effects. In one aspect, cytokines of the present invention may be utilized to modulate cytokine expression in the event of adverse effects. In some embodiments, cytokines of the present invention may be designed to have prolonged life span or enhanced specificity to minimize toxicity.

[0584] In some embodiments, the payload of the present invention may be an interleukin (IL) cytokine. Interleukins (ILs) are a class of glycoproteins produced by leukocytes for regulating immune responses. As used herein, the term “interleukin (IL)” refers to an interleukin polypeptide from any species or source and includes the full-length protein as well as fragments or portions of the protein. In some aspects, the interleukin payload is selected from IL1, IL1alpha (also called hematopoietin-1), IL1beta (catabolin), IL1 delta, IL1epsilon, IL1eta, IL1 zeta, interleukin-1 family member 1 to 11 (IL1F1 to IL1F11), interleukin-1 homolog 1 to 4 (IL1H1 to IL1H4), IL1 related protein 1 to 3 (IL1RP1 to IL1RP3), IL2, IL3, IL4, IL5, IL6, IL7, IL8, IL9, IL10, IL10C, IL10D, IL11, IL11a, IL1b, IL12, IL13, IL14, IL15, IL16, IL17, IL17A, 1117B, IL17C, IL17E, IL17F, IL18, IL19, IL20, IL20 like (IL20L), 1121, IL22, IL23, IL23A, IL23-p19, IL23-p40, IL24, Il25, IL26, IL27, IL28A, IL28B, IL29, IL30, IL31, IL32, IL33, IL34, IL35, IL36 alpha, IL36 beta, IL36 gamma, IL36RN, IL37, IL37a, IL37b, IL37c, IL37d, IL37e and IL38. In other aspects, the payload of the present invention may be an interleukin receptor selected from CD121a, CDw121b, IL2Rα/CD25, IL2Rβ/CD122, IL2Rγ/CD132, CDw131, CD124, CD131, CDw125, CD126, CD130, CD127, CDw210, IL8RA, IL11Ra, CD212, CD213α1, CD213α2, IL14R, IL15Rα, CDw217, IL18Rα, IL18Rβ, IL220Rα, and IL20Rβ.

[0585] In one embodiment, the payload of the invention may comprise IL2. In one aspect, the effector module of the invention may be a DD-IL2 fusion polypeptide. The amino acid sequences corresponding to DD-IL2 and its components are listed in the Table 23. The amino acid sequences in Table 23 may comprise a stop codon which is denoted in the table with a at the end of the amino acid sequence.

TABLE 23
DD-IL2 construct sequences

| | | | Nucleic |
|---|---|---|---|
| | | Amino | Acid SEQ |
| | | Acid SEQ | ID NO/ |
| Description | Amino Acid Sequence | ID NO | Sequence |
| IL2 signal | MYRMQLLSCIALSLALVTNS | 2776 | 5256-5257 |
| sequence | | | |
| Linker | EFSTEF | 2777 | 5260 |
| Linker | MH | — | ATGCAC |
| IL2 | APTSSSTKKTQLQLEHLLLDLQMILNGINNYKNPKLTRM | 743 | 5261-5262 |
| | LTFKFYMPKKATELKHLQCLEEELKPLEEVLNLAQSKNF | | |
| | HLRPRDLISNINVIVLELKGSETTFMCEYADETATIVEF | | |
| | LNRWITFCQSIISTLT | | |
| FKBP (F36V, | GVQVETISPGDGRTFPKRGQTCVVHYTGMLEDGKKVDSS | 2778 | 5263-5268 |
| L106P) | RDRNKPFKFMLGKQEVIRGWEEGVAQMSVGQRAKLTISP | | |
| | DYAYGATGHPGIIPPHATLVFDVELLKPE | | |
| ecDHFR (Amino | ISLIAALAVDYVIGMENAMPWNLPADLAWFKRNTLNKPV | 2774 | 5238-5244 |
| acid 2-159 of | IMGRHTWESIGRPLPGRKNIILSSQPGTDDRVTWVKSVD | | |
| WT)(R12Y, | EAIAACGDVPEIMVIGGGRVIEQFLPKAQKLYLTHIDAE | | |
| Y100I) | VEGDTHFPDYEPDDWESVFSEFHDADAQNSHSYCFEILE | | |
| | RR | | |
| OT-IL2-001 (IL2 | MYRMQLLSCIALSLALVTNSEFSTEFGVQVETISPGDGR | 1146 | 5269 |
| Signal Sequence- | TFPKRGQTCVVHYTGMLEDGKKVDSSRDRNKPFKFMLGK | | |
| Linker (EFSTEF | QEVIRGWEEGVAQMSVGQRAKLTISPDYAYGATGHPGII | | |
| (SEQ ID NO: | PPHATLVFDVELLKPEMHAPTSSSTKKTQLQLEHLLQMI | | |
| 3086))-FKBP | LDLLNGINNYKNPKLTRMLTFKFYMPKKATELKHLQCLE | | |
| (F36V, L106P)- | EELKPLEEVLNLAQSKNFHLRPRDLISNINVIVLELKGS | | |
| Linker (MH)- | ETTFMCEYADETATIVEFLNRWITFCQSIISTLT | | |
| IL2-stop) | | | |
| OT-IL2-002 (IL2 | MYRMQLLSCIALSLALVTNSAPTSSSTKKTQLQLEHLLL | 1147 | 5270 |
| Signal Sequence- | DLQMILNGINNYKNPKLTRMLTFKFYMPKKATELKHLQC | | |
| IL2-stop) | LEEELKPLEEVLNLAQSKNFHLRPRDLISNINVIVLELK | | |
| | GSETTFMCEYADETATIVEFLNRWITFCQSIISTLT | | |
| OT-IL2-003 (IL2 | MYRMQLLSCIALSLALVTNSEFSTEFISLIAALAVDYVI | 1148 | 5271 |
| Signal Sequence- | GMENAMPWNLPADLAWFKRNTLNKPVIMGRHTWESIGRP | | |
| Linker (EFSTEF | LPGRKNIILSSQPGTDDRVTWVKSVDEAIAACGDVPEIM | | |
| (SEQ ID NO: | VIGGGRVIEQFLPKAQKLYLTHIDAEVEGDTHFPDYEPD | | |
| 3086))- ecDHFR | DWESVFSEFHDADAQNSHSYCFEILERRMHAPTSSSTKK | | |
| (Amino acid 2- | TQLQLEHLLLDLQMILNGINNYKNPKLTRMLTFKFYMPK | | |
| 159 of WT) | KATELKHLQCLEEELKPLEEVLNLAQSKNFHLRPRDLIS | | |
| (R12Y, Y100I)- | NINVIVLELKGSETTFMCEYADETATIVEFLNRWITFCQ | | |
| Linker (MH)- | SIISTLT | | |
| IL2-stop) | | | |

[0586] In some aspects of the invention, an IL2 mutein may be used as a payload. As used herein, the term “mutein” is a construct, molecule or sequence of a mutation, change or alteration in a protein and hence is also known as a mutant, e.g., a protein mutant, mutein. Consequently, an “IL2 mutein” is an IL2 mutant. In some embodiments an IL2 mutein is a variant of wild type IL2 protein, where the wildtype IL2 consists of the amino acid sequence of SEQ ID NO. 5272. In some aspects, it refers to an IL2 variant which binds to and activates only cells expressing IL2Rαβγ, but does not significantly bind to or activate cell expressing only IL2Rβ7. In some examples, an IL2 mutein may be an IL2 protein in which residues of IL2 responsible for binding to either IL2Rβ or IL2Rγ are substituted to abolish the interaction of IL2 with IL2Rβ or IL2Rγ. In other examples, an IL2 mutein may be an IL2 protein comprising mutations conferring high affinity for IL2Rα. An IL2 mutein may be an IL2 selective agonist (IL2_{SA}) which can preferentially activate the high affinity IL2 receptor (i.e., IL2Rαβγ) which is necessary to selectively activate T cells with respect to NK cells. In some embodiments, the IL2 mutein may be IL2 protein which preferentially binds to the lower affinity IL2Rβγ but with reduced affinity to CD25.

[0587] In some embodiments, IL2 muteins may be used to preferentially expand or stimulate Treg cells. As used herein “preferentially expand or stimulate Treg cells” means the IL2 muteins promote the proliferation, survival, activation and/or function of T regulatory cells.

[0588] Exemplary IL2 muteins may include, but are not limited to, N88R substitution (Shanafelt et al., Nature Biotech., 2000, 18:1197-1202), an IL2 with a V91K substitution (e.g., US Patent publication NO. US20140286898); V91K substitution, C125A substitution, an IL2 with three mutations: V69A, N71R, Q74P; an IL2 mutein with high affinity for IL2Rα (N29S, Y31H, K35R, T37A, K48E, V69A, N71R, Q74P); an IL2 mutein with high affinity for IL2Ra and reduced signaling activity (N29S, Y31H, K35R, T37A, K48E, V69A, N71R, Q74P, N88D), and D20H, D20I, N88G, N88I, N88R, and Q126L substitutions as described in PCT application NO. 1999060128; the contents of each of which are incorporated herein by reference in their entirety. In other aspects, IL2 muteins may include those described in U.S. Pat. Nos. 4,518,584; 5,116,943; 5,206,344; 6,955,807; 7,105,653; 7,371,371; 7,803,361; 8,124,066; 8,349,311; 8,759,486; and 9,206,243; PCT patent publication NOs. WO2005086751 and WO2012088446; European Patent N.s.: EP0234599 and EP0200280 and Sim, G. C. et al. (2016) Cancer Immunol Res; 4(11):983-994; the contents of each of which are incorporated herein by reference in their entirety.

[0589] In some aspects, the IL2 mutein may be fused to a polypeptide that extends the serum half-life of the IL2 mutein, such as an IgG Fc fragment. Preferred Fc regions are derived from human IgG, which includes IgG1, IgG2, IgG3, and IgG4. In other aspects, the payload of the invention may be an IL2 fusion protein comparing a second functional polypeptide. In a non-limiting example, an IL2 fusion protein may comprise an IL2 or IL2 mutein polypeptide fused with a pro-apoptotic Bcl-2 family polypeptide (such as Bad, Bik/Nbk, Bid, Bim/Bod, Hrk, Bak or Bax); such fusion protein may be capable of inhibiting cell survival, inhibiting cell proliferation, or enhancing cell death or apoptosis of a target cell expressing an IL2 receptor. Alternatively, an IL2 or IL2 mutein polypeptide may be fused with an anti-apoptotic Bcl-2 family polypeptide (such as Bcl-xL, Bcl-w or Bcl-2). The fusion protein may be capable of enhancing cell survival, enhancing cell proliferation, or inhibiting cell death or apoptosis of a target cell expressing an IL2 receptor. See, e.g., US patent publication NOS. US2016/0229901.

[0590] In addition, the IL2 fusion protein may be a IL2-GMCSF fusion protein which can promote cell-cell interaction; therefore, enhances anti-cancer immune responses (Wen et al., J. Translational Med., 2016, 14: 41).

[0591] In one embodiment, the payload of the invention may comprise IL12. IL12 is a heterodimeric protein of two subunits (p35, p40) that is secreted by antigen presenting cells, such as macrophages and dendritic cells. Expression of IL12 requires the simultaneous expression of the two subunits to produce a biologically active heterodimer. In some embodiments, payloads of the invention may be p35 subunit or the p40 subunit. IL12 is type 1 cytokine that acts on natural killer (NK) cells, macrophages, CD8⁺ Cytotoxic T cells, and CD4⁺ T helper cells through STAT4 pathway to induce IFN-7 production in these effector immune cells (reviewed by Trinchieri G, Nat Rev Immunol. 2003; 3(2): 133-146). IL12 can promote the cytotoxic activity of NK cells and CD8⁺ T cells, therefore has anti-tumor function as well as promote T cell persistence in vivo. Intravenous injection of recombinant IL12 exhibited modest clinical efficacy in a handful of patients with advanced melanoma and renal cell carcinoma (Gollob et al., Clin. Cancer Res. 2000; 6(5):1678-1692). IL12 has been used as an adjuvant to enhance cytotoxic immunity using a melanoma antigen vaccine, or using peptide pulsed peripheral blood mononuclear cells; and to promote NK cell activity in breast cancer with trastuzumab treatment. Local delivery of IL12 to the tumor microenvironment promotes tumor regression in several tumor models. These studies all indicate that locally increased IL12 level can promote anti-tumor immunity. One major obstacle of systemic or local administration of recombinant IL12 protein, or through oncolytic viral vectors is the severe side effects when IL12 is presented at high level. Developing a system that tightly controls IL12 level may provide a safe use of IL12 in cancer treatment. A regulatable IL12 composition may also prevent negative feedback loops, thereby enhancing T cell effector functions.

[0592] In one aspect, the effector module of the invention may be a DD-IL12 fusion polypeptide. This regulatable DD-IL12 fusion polypeptide may be directly used as an immunotherapeutic agent or be transduced into an immune effector cell (T cells and TIL cells) to generate modified T cells with greater in vivo expansion and survival capabilities for adoptive cell transfer. The need for harsh preconditioning regimens in current adoptive cell therapies may be minimized using regulated IL12 DD-IL12 may be utilized to modify tumor microenvironment and increase persistence in solid tumors that are currently refractory to tumor antigen targeted therapy. In some embodiments, CAR expressing T cells may be armored with DD regulated IL12 to relieve immunosuppression without systemic toxicity. In some embodiments, the payloads of the present invention may be used to enhance cell therapies with performance optimized for challenging tumor microenvironments.

[0593] In some embodiments, the IL12 may be a Flexi IL12, wherein both p35 and p40 subunits, are encoded by a single cDNA that produces a single chain polypeptide. The single chain polypeptide may be generated by placing p35 subunit at the N terminus or the c terminus of the single chain polypeptide. Similarly, the p40 subunit may be at the N terminus or C terminus of the single chain polypeptide. In some embodiments, the IL12 constructs of the invention may be placed under the transcriptional control of the CMV promoter (SEQ ID NO. 5273), an EF1a promoter (SEQ TD NO. 5274, SEQ ID NO. 5276) or a PGK promoter (SEQ ID NO. 5275). Any portion of IL12 that retains one or more functions of full length or mature IL12 may be useful in the present invention. In some aspects, the DD-IL12 comprises the amino acid sequences listed in Table 24. The amino acid sequences in Table 24 may comprise a stop codon which is denoted in the table with a “*k” at the end of the amino acid sequence.

TABLE 24
DD-IL12 constructs

| | | | Amino | |
|---|---|---|---|---|
| | | | acid | Nucleic |
| | | | SEQ ID | Acid SEQ |
| Description | Promoter | Amino acid Sequence | NO | ID NO |
| p40 signal | — | MCHQQLVISWFSLVFLASPLVA | 2748 | 5277-5285 |
| sequence | | | | |
| Linker | — | GGSGG | 2754 | 5286-5287 |
| Linker | — | GGGGSGGGGSGGGGS | 2755 | 5288-5293 |
| Linker | | GS | — | GGATCC |
| Spacer | | ATNFSLLKQAGDVEENPGP | 2779 | 5294 |
| Furin cleavage | — | SARNRQKRS | 2780 | 5295 |
| site | | | | |
| Furin cleavage | — | ARNRQKRS | 2781 | 5296 |
| site | | | | |
| Modified Furin | — | ESRRVRRNKRSK | 2759 | 5297- |
| | | | | 5299 |
| P2A Cleavable | — | GATNFSLLKQAGDVEENPGP | 2782 | 5300 |
| Peptide | | | | |
| p40 | — | IWELKKDVYVVELDWYPDAPGEMVVLTCDT | 2749 | 5301-5313 |
| | | PEEDGITWTLDQSSEVLGSGKTLTIQVKEF | | |
| | | GDAGQYTCHKGGEVLSHSLLLLHKKEDGIW | | |
| | | STDILKDQKEPKNKTFLRCEAKNYSGRFTC | | |
| | | WWLTTISTDLTFSVKSSRGSSDPQGVTCGA | | |
| | | ATLSAERVRGDNKEYEYSVECQEDACPAAE | | |
| | | ESLPIEVMVDAVHKLKYENYTSSFFIRDII | | |
| | | KPDPPKNLQLKPLKNSRQVEVSWEYPDTWS | | |
| | | TPHSYFSLTFCVQVQGKSKREKKDRVFTDK | | |
| | | TSATVICRKNASISVRAQDRYYSSSWSEWA | | |
| | | SVPCS | | |
| p40 (K217N) | - | IWELKKDVYVVELDWYPDAPGEMVVLTCDT | 2783 | 5314 |
| | | PEEDGITWTLDQSSEVLGSGKTLTIQVKEF | | |
| | | GDAGQYTCHKGGEVLSHSLLLLHKKEDGIW | | |
| | | STDILKDQKEPKNKTFLRCEAKNYSGRFTC | | |
| | | WWLTTISTDLTFSVKSSRGSSDPQGVTCGA | | |
| | | ATLSAERVRGDNKEYEYSVECQEDSACPAA | | |
| | | EESLPIEVMVDAVHKLKYENYTSSFFIRDI | | |
| | | IKPDPPNNLQLKPLKNSRQVEVSWEYPDTW | | |
| | | STPHSYFSLTFCVQVQGKSKREKKDRVFTD | | |
| | | KTSATVICRKNASISVRAQDRYYSSSWSEW | | |
| | | ASVPCS | | |
| p35 | — | RNLPVATPDPGMFPCLHHSQNLLRAVSNML | 2750 | 5315-5325 |
| | | QKARQTLEFYPCTSEEIDHEDITKDKTSTV | | |
| | | EACLPLELTKNESCLNSRETSFITNGSCLA | | |
| | | SRKTSFMMALCLSSIYEDLKMYQVEFKTMN | | |
| | | AKLLMDPKRQIFLDQNMLAVIDELMQALNF | | |
| | | NSETVPQKSSLEEPDFYKTKIKLCILLHAF | | |
| | | RIRAVTIDRVMSYLNAS | | |
| p35 | — | RNLPVATPDPGMFPCLHHSQNLLRAVSNMLQ | 735 | 5327-5336 |
| | | KARQTLEFYPCTSEEIDHEDITKDKTSTVEA | | |
| | | CLPLELTKNESCLNSRETSFITNGSCLASRK | | |
| | | TSFMMALCLSSIYEDLKMYQVEF-KTMNAKL | | |
| | | LMDPKRQIFLDQNMLAVIDELMQALNFNSET | | |
| | | VPQKSSLEEPDFYKTKIKLCILLHAFRIRAV | | |
| | | TIDRVMSYLNAS* | | |
| ecDHFR | — | ISLIAALAVDYVIGMENAMPWNLPADLAWF | 1174 | 5338-5343 |
| (Amino acid 2- | | KRNTLNKPVIMGRHTWESIGRPLPGRKNII | | |
| 159 of WT) | | LSSQPGTDDRVTWVKSVDEAIAACGDVPEI | | |
| (R12Y, Y100I) | | MVIGGGRVIEQFLPKAQKLYLTHIDAEVEG | | |
| | | DTHFPDYEPDDWESVFSEFHDADAQNSHSY | | |
| | | CFEILERR | | |
| FKBP(F36V, | - | GVQVETISPGDGRTFPKRGQTCVVHYTGML | 1176 | 5345-5349 |
| L106P) | | EDGKKVDSSRDRNKPFKFMLGKQEVIRGWE | | |
| | | EGVAQMSVGQRAKLTISPDYAYGATGHPGI | | |
| | | IPPHATLVFDVELLKPE | | |
| FKBP(F36V, | - | GVQVETISPGDGRTFPKRGQTCVVHYTGM | 1177 | 5351-5357 |
| E31G, R71G, | | LGDGKKVDSSRDRNKPFKFMLGKQEVIRG | | |
| K105E) | | WEEGVAQMSVGQGAKLTISPDYAYGATGH | | |
| | | PGIIPPHATLVFDVELLELE | | |
| hDHFR | — | VGSLNCIVAVSQNMGIGKNGDLPWPPLRNE | 1230 | 5358 |
| (Amino acid 2- | | FRYFFRMTTTSSVEGKQNLVIMGKKTWFSI | | |
| 187 of WT; | | PEKNRPLKGRINLVLSRELKEPPQGAHFLS | | |
| Q36F, Y122I, | | RSLDDALKLTEQPELANKVDMVWIVGGSSV | | |
| A125F) | | IKEFMNHPGHLKLFVTRIMQDFESDTFFPE | | |
| | | IDLEKYKLLPEYPGVLSDVQEEKGIKYKFE | | |
| | | VYEKND | | |
| hDHFR | — | VGSLNCIVAVSQNMGVGKNGDLPWPPLRN | 1256 | 5359 |
| (Amino acid 2- | | EFRYFQRMTTTSSVEGKQNLVIMGKKTWF | | |
| 187 of WT) | | SIPEKNRPLKGRINLVLSRELKEPPQGAH | | |
| (I17V) | | FLSRSLDDALKLTEQPELANKVDMVWIVG | | |
| | | GSSVYKEAMNHPGHLKLFVTRIMQDFESD | | |
| | | TFFPEIDLEKYKLLPEYPGVLSDVQEEKG | | |
| | | IKYKFEVYEKND | | |
| hDHFR | — | VGSLNCIVAVSQNMGIGKNGDLPWPPLRN | 1257 | 5360-5361 |
| (Amino acid 2- | | EFRYFQRMTTTSSVEGKQNLVIMGKKTWF | | |
| 187 of WT) | | SIPEKNRPLKGRINLVLSRELKEPPQGAH | | |
| (Y122I) | | FLSRSLDDALKLTEQPELANKVDMVWIVG | | |
| | | GSSVIKEAMNHPGHLKLFVTRIMQDFESD | | |
| | | TFFPEIDLEKYKLLPEYPGVLSDVQEEKG | | |
| | | IKYKFEVYEKND | | |
| OT-IL12-001 | CMV | MCHQQLVISWFSLVFLASPLVAGVQVETI | 182 2784 | 5362 |
| (p40 signal | | SPGDGRTFPKRGQTCVVHYTGMLEDGKKV | | |
| sequence- | | DSSRDRNKPFKFMLGKQEVIRGWEEGVAQ | | |
| FKBP(F36V, | | MSVGQRAKLTISPDYAYGATGHPGIIPPH | | |
| L106P)-linker | | ATLVFDVELLKPEGGSGGIWELKKDVYVV | | |
| (GGSGG(SEQ | | ELDWYPDAPGEMVVLTCDTPEEDGITWTL | | |
| ID NO: 2729))- | | DQSSEVLGSGKTLTIQVKEFGDAGQYTCH | | |
| p40-linker2 | | KGGEVLSHSLLLLHKKEDGIWSTDILKDQ | | |
| (G4S)3 (SEQ | | KEPKNKTFLRCEAKNYSGRFTCWWLTTIS | | |
| ID NO: 2731)- | | TDLTFSVKSSRGSSDPQGVTCGAATLSAE | | |
| p35-stop) | | RVRGDNKEYEYSVECQEDSACPAAEESLP | | |
| | | IEVMVDAVHKLKYENYTSSFFIRDIIKPD | | |
| | | PPKNLQLKPLKNSRQVEVSWEYPDTWSTP | | |
| | | HSYFSLTFCVQVQGKSKREKKDRVFTDKT | | |
| | | SATVICRKNASISVRAQDRYYSSSWSEWA | | |
| | | SVPCSGGGGSGGGGSGGGGSRNLPVATPD | | |
| | | PGMFPCLHHSQNLLRAVSNMLQKARQTLE | | |
| | | FYPCTSEEIDHEDITKDKTSTVEACLPLE | | |
| | | LTKNESCLNSRETSFITNGSCLASRKTSF | | |
| | | MMALCLSSIYEDLKMYQVEFKTMNAKLLM | | |
| | | DPKRQIFLDQNMLAVIDELMQALNFNSET | | |
| | | VPQKSSLEEPDFYKTKIKLCILLHAFRIR | | |
| | | AVTIDRVMSYLNAS* | | |
| OT-IL12-002 | CMV | MGVQVETISPGDGRTFPKRGQTCVVHYTG | 2785 | 5363 |
| (Met-FKBP | | MLEDGKKVDSSRDRNKPFKFMLGKQEVIR | | |
| (F36V, L106P)- | | GWEEGVAQMSVGQRAKLTISPDYAYGATG | | |
| linker | | HPGIIPPHATLVFDVELLKPEGGSGGMCH | | |
| (GGSGG(SEQ | | QQLVISWFSLVFLASPLVAIWELKKDVYV | | |
| ID NO: 2729))- | | VELDWYPDAPGEMVVLTCDTPEEDGITWT | | |
| p40 signal | | LDQSSEVLGSGKTLTIQVKEFGDAGQYTC | | |
| sequence-p40- | | HKGGEVLSHSLLLLHKKEDGIWSTDILKD | | |
| linker ((G4S)3 | | QKEPKNKTFLRCEAKNYSGRFTCWWLTTI | | |
| (SEQ ID NO: | | STDLTFSVKSSRGSSDPQGVTCGAATLSA | | |
| 2731))-p35- | | ERVRGDNKEYEYSVECQEDSACPAAEESL | | |
| stop) | | PIEVMVDAVHKLKYENYTSSFFIRDIIKP | | |
| | | DPPKNLQLKPLKNSRQVEVSWEYPDTWST | | |
| | | PHSYFSLTFCVQVQGKSKREKKDRVFTDK | | |
| | | TSATVICRKNASISVRAQDRYYSSSWSEW | | |
| | | ASVPCSGGGGSGGGGSGGGGSRNLPVATP | | |
| | | DPGMFPCLHHSQNLLRAVSNMLQKARQTL | | |
| | | EFYPCTSEEIDHEDITKDKTSTVEACLPL | | |
| | | ELTKNESCLNSRETSFITNGSCLASRKTS | | |
| | | FMMALCLSSIYEDLKMYQVEFKTMNAKLL | | |
| | | MDPKRQIFLDQNMLAVIDELMQALNFNSE | | |
| | | TVPQKSSLEEPDFYKTKIKLCILLHAFRI | | |
| | | RAVTIDRVMSYLNAS* | | |
| OT-IL12-003 | CMV | MCHQQLVISWFSLVFLASPLVAGVQVETI | 2786 | 5364 |
| (p40 signal | | SPGDGRTFPKRGQTCVVHYTGMLEDGKKV | | |
| sequence- | | DSSRDRNKPFKFMLGKQEVIRGWEEGVAQ | | |
| FKBP(F36V, | | MSVGQRAKLTISPDYAYGATGHPGIIPPH | | |
| L106P)-furin | | ATLVFDVELLKPESARNRQKRSIWELKKD | | |
| (SARNRQKRS | | VYVVELDWYPDAPGEMVVLTCDTPEEDGI | | |
| (SEQ ID NO: | | TWTLDQSSEVLGSGKTLTIQVKEFGDAGQ | | |
| 2732))-p40- | | YTCHKGGEVLSHSLLLLHKKEDGIWSTDI | | |
| linker ((G4S)3 | | LKDQKEPKNKTFLRCEAKNYSGRFTCWWL | | |
| (SEQ ID NO: | | TTISTDLTFSVKSSRGSSDPQGVTCGAAT | | |
| 2731))-p35- | | LSAERVRGDNKEYEYSVECQEDSACPAAE | | |
| stop) | | ESLPIEVMVDAVHKLKYENYTSSFFIRDI | | |
| | | IKPDPPKNLQLKPLKNSRQVEVSWEYPDT | | |
| | | WSTPHSYFSLTFCVQVQGKSKREKKDRVF | | |
| | | TDKTSATVICRKNASISVRAQDRYYSSSW | | |
| | | SEWASVPCSGGGGSGGGGSGGGGSRNLPV | | |
| | | ATPDPGMFPCLHHSQNLLRAVSNMLQKAR | | |
| | | QTLEFYPCTSEEIDHEDITKDKTSTVEAC | | |
| | | LPLELTKNESCLNSRETSFITNGSCLASR | | |
| | | KTSFMMALCLSSIYEDLKMYQVEFKTMNA | | |
| | | KLLMDPKRQIFLDQNMLAVIDELMQALNF | | |
| | | NSETVPQKSSLEEPDFYKTKIKLCILLHA | | |
| | | FRIRAVTIDRVMSYLNAS* | | |
| OT-IL12-004 | CMV | MCHQQLVISWFSLVFLASPLVAIWELKKDV | 2787 | 5365 |
| (p40 signal | | YVVELDWYPDAPGEMVVLTCDTPEEDGIT | | |
| sequence-p40- | | WTLDQSSEVLGSGKTLTIQVKEFGDAGQYT | | |
| linker ((G4S)3 | | CHKGGEVLSHSLLLLHKKEDGIWSTDILKD | | |
| (SEQ ID NO: | | QKEPKNKTFLRCEAKNYSGRFTCWWLTTIS | | |
| 2731))-p35- | | TDLTFSVKSSRGSSDPQGVTCGAATLSAER | | |
| furin | | VRGDNKEYEYSVECQEDSACPAAEESLPIE | | |
| (ARNRQKRS | | VMVDAVHKLKYENYTSSFFIRDIIKPDPPKN | | |
| (SEQ ID NO: | | LQLKPLKNSRQVEVSWEYPDTWSTPHSYFS | | |
| 2733))-FKBP | | LTFCVQVQGKSKREKKDRVFTDKTSATVIC | | |
| (E31G, F36V, | | RKNASISVRAQDRYYSSSWSEWASVPCSGG | | |
| R71G, K105E)- | | GGSGGGGSGGGGSRNLPVATPDPGMFPCL | | |
| stop) | | HHSQNLLRAVSNMLQKARQTLEFYPCTSEE | | |
| | | IDHEDITKDKTSTVEACLPLELTKNESCLNS | | |
| | | RETSFITNGSCLASRKTSFMMALCLSSIYED | | |
| | | LKMYQVEFKTMNAKLLMDPKRQIFLDQN | | |
| | | MLAVIDELMQALNFNSETVPQKSSLEEPDF | | |
| | | YKTKIKLCILLHAFRIRAVTIDRVMSYLNAS | | |
| | | ARNRQKRSGVQVETISPGDGRTFPKRGQTC | | |
| | | VVHYTGMLGDGKKVDSSRDRNKPFKFML | | |
| | | GKQEVIRGWEEGVAQMSVGQGAKLTISPD | | |
| | | YAYGATGHPGIIPPHATLVFDVELLELE* | | |
| OT-IL12-005 | CMV | MCHQQLVISWFSLVFLASPLVAIWELKKDV | 2788 | 5366 |
| (p40 signal | | YVVELDWYPDAPGEMVVLTCDTPEEDGIT | | |
| sequence-p40- | | WTLDQSSEVLGSGKTLTIQVKEFGDAGQYT | | |
| linker-((G4S)3 | | CHKGGEVLSHSLLLLHKKEDGIWSTDILKD | | |
| (SEQ ID NO: | | QKEPKNKTFLRCEAKNYSGRFTCWWLTTIS | | |
| 2731))-p35- | | TDLTFSVKSSRGSSDPQGVTCGAATLSAER | | |
| linker (GGSG | | VRGDNKEYEYSVECQEDSACPAAEESLPIE | | |
| (SEQ ID NO: | | VMVDAVHKLKYENYTSSFFIRDIIKPDPPKN | | |
| 2735))-FKBP | | LQLKPLKNSRQVEVSWEYPDTWSTPHSYFS | | |
| (E31G, F36V, | | LTFCVQVQGKSKREKKDRVFTDKTSATVIC | | |
| R71G, K105E)- | | RKNASISVRAQDRYYSSSWSEWASVPCSGG | | |
| stop) | | GGSGGGGSGGGGSRNLPVATPDPGMFPCL | | |
| | | HHSQNLLRAVSNMLQKARQTLEFYPCTSEE | | |
| | | IDHEDITKDKTSTVEACLPLELTKNESCLNS | | |
| | | RETSFITNGSCLASRKTSFMMALCLSSIYED | | |
| | | LKMYQVEFKTMNAKLLMDPKRQIFLDQN | | |
| | | MLAVIDELMQALNFNSETVPQKSSLEEPDF | | |
| | | YKTKIKLCILLHAFRIRAVTIDRVMSYLNAS | | |
| | | GGSGGVQVETISPGDGRTFPKRGQTCVVHY | | |
| | | TGMLGDGKKVDSSRDRNKPFKFMLGKQEV | | |
| | | IRGWEEGVAQMSVGQGAKLTISPDYAYGA | | |
| | | TGHPGIIPPHATLVFDVELLELE* | | |
| OT-IL12-006 | CMV | MCHQQLVISWFSLVFLASPLVAIWELKKDV | 2789 | 5367 |
| (p40 signal | | YVVELDWYPDAPGEMVVLTCDTPEEDGIT | | |
| sequence-p40- | | WTLDQSSEVLGSGKTLTIQVKEFGDAGQYT | | |
| linker ((G4S)3 | | CHKGGEVLSHSLLLLHKKEDGIWSTDILKD | | |
| (SEQ ID NO: | | QKEPKNKTFLRCEAKNYSGRFTCWWLTTIS | | |
| 2731))-p35- | | TDLTFSVKSSRGSSDPQGVTCGAATLSAER | | |
| stop) | | VRGDNKEYEYSVECQEDSACPAAEESLPIE | | |
| | | VMVDAVHKLKYENYTSSFFIRDIIKPDPPKN | | |
| | | LQLKPLKNSRQVEVSWEYPDTWSTPHSYFS | | |
| | | LTFCVQVQGKSKREKKDRVFTDKTSATVIC | | |
| | | RKNASISVRAQDRYYSSSWSEWASVPCSGG | | |
| | | GGSGGGGSGGGGSRNLPVATPDPGMFPCL | | |
| | | HHSQNLLRAVSNMLQKARQTLEFYPCTSEE | | |
| | | IDHEDITKDKTSTVEACLPLELTKNESCLNS | | |
| | | RETSFITNGSCLASRKTSFMMALCLSSIYED | | |
| | | LKMYQVEFKTMNAKLLMDPKRQIFLDQN | | |
| | | MLAVIDELMQALNFNSETVPQKSSLEEPDF | | |
| | | YKTKIKLCILLHAFRIRAVTIDRVMSYLNAS | | |
| | | * | | |
| OT-IL12-007 | CMV | MCHQQLVISWFSLVFLASPLVAISLIAALAV | 2790 | 1835 |
| (p40 signal | | DYVIGMENAMPWNLPADLAWFKRNTLNK | | |
| sequence; | | PVIMGRHTWESIGRPLPGRKNIILSSQPGTD | | |
| ecDHFR | | DRVTWVKSVDEAIAACGDVPEIMVIGGGR | | |
| (Amino acid 2- | | VIEQFLPKAQKLYLTHIDAEVEGDTHFPDYE | | |
| 159 of WT) | | PDDWESVFSEFHDADAQNSHSYCFEILERR | | |
| (R12Y, 100I)- | | ESRRVRRNKRSKIWELKKDVYVVELDWYP | | |
| furin site | | DAPGEMVVLTCDTPEEDGITWTLDQSSEVL | | |
| (ESRRVRRNK | | GSGKTLTIQVKEFGDAGQYTCHKGGEVLSH | | |
| RSK (SEQ ID | | SLLLLHKKEDGIWSTDILKDQKEPKNKTFLR | | |
| NO: 2734))- | | CEAKNYSGRFTCWWLTTISTDLTFSVKSSR | | |
| p40-linker | | GSSDPQGVTCGAATLSAERVRGDNKEYEY | | |
| ((G4S)3 (SEQ | | SVECQEDSACPAAEESLPIEVMVDAVHKLK | | |
| ID NO: 2731))- | | YENYTSSFFIRDIIKPDPPKNLQLKPLKNSRQ | | |
| p35) | | VEVSWEYPDTWSTPHSYFSLTFCVQVQGKS | | |
| | | KREKKDRVFTDKTSATVICRKNASISVRAQ | | |
| | | DRYYSSSWSEWASVPCSGGGGSGGGGSGG | | |
| | | GGSRNLPVATPDPGMFPCLHHSQNLLRAVS | | |
| | | NMLQKARQTLEFYPCTSEEIDHEDITKDKTS | | |
| | | TVEACLPLELTKNESCLNSRETSFITNGSCL | | |
| | | ASRKTSFMMALCLSSIYEDLKMYQVEFKT | | |
| | | MNAKLLMDPKRQIFLDQNMLAVIDELMQA | | |
| | | LNFNSETVPQKSSLEEPDFYKTKIKLCILLH | | |
| | | AFRIRAVTIDRVMSYLNAS | | |
| OT-IL12-008 | CMV | MCHQQLVISWFSLVFLASPLVAVGSLNCIV | 2791 | 5369 |
| (p40 signal | | AVSQNMGIGKNGDLPWPPLRNEFRYFFRM | | |
| sequence; | | TTTSSVEGKQNLVIMGKKTWFSIPEKNRPL | | |
| hDHFR | | KGRINLVLSRELKEPPQGAHFLSRSLDDALK | | |
| (Amino acid 2- | | LTEQPELANKVDMVWIVGGSSVIKEFMNHP | | |
| 187 of WT) | | GHLKLFVTRIMQDFESDTFFPEIDLEKYKLL | | |
| (Q36K, Y122I, | | PEYPGVLSDVQEEKGIKYKFEVYEKNDESR | | |
| A125F)-furin | | RVRRNKRSKIWELKKDVYVVELDWYPDAP | | |
| site | | GEMVVLTCDTPEEDGITWTLDQSSEVLGSG | | |
| (ESRRVRRNK | | KTLTIQVKEFGDAGQYTCHKGGEVLSHSLL | | |
| RSK (SEQ ID | | LLHKKEDGIWSTDILKDQKEPKNKTFLRCE | | |
| NO: 2734))- | | AKNYSGRFTCWWLTTISTDLTFSVKSSRGS | | |
| p40- | | SDPQGVTCGAATLSAERVRGDNKEYEYSV | | |
| linken(G4S)3 | | ECQEDSACPAAEESLPIEVMVDAVHKLKYE | | |
| (SEQ ID NO: | | NYTSSFFIRDIIKPDPPKNLQLKPLKNSRQVE | | |
| 2731))-p35) | | VSWEYPDTWSTPHSYFSLTFCVQVQGKSKR | | |
| | | EKKDRVFTDKTSATVICRKNASISVRAQDR | | |
| | | YYSSSWSEWASVPCSGGGGSGGGGSGGGG | | |
| | | SRNLPVATPDPGMFPCLHHSQNLLRAVSNM | | |
| | | LQKARQTLEFYPCTSEEIDHEDITKDKTSTV | | |
| | | EACLPLELTKNESCLNSRETSFITNGSCLASR | | |
| | | KTSFMMALCLSSIYEDLKMYQVEFKTMNA | | |
| | | KLLMDPKRQIFLDQNMLAVIDELMQALNF | | |
| | | NSETVPQKSSLEEPDFYKTKIKLCILLHAFRI | | |
| | | RAVTIDRVMSYLNAS | | |
| OT-IL12-009 | CMV | MCHQQLVISWFSLVFLASPLVAIWELKKDV | 2792 | 5370 |
| (p40 signal | | YVVELDWYPDAPGEMVVLTCDTPEEDGIT | | |
| sequence-p40- | | WTLDQSSEVLGSGKTLTIQVKEFGDAGQYT | | |
| linker | | CHKGGEVLSHSLLLLHKKEDGIWSTDILKD | | |
| ((G4S)3 (SEQ | | QKEPKNKTFLRCEAKNYSGRFTCWWLTTIS | | |
| ID NO: 2731))- | | TDLTFSVKSSRGSSDPQGVTCGAATLSAER | | |
| p35-furin | | VRGDNKEYEYSVECQEDSACPAAEESLPIE | | |
| (ESRRVRRNK | | VMVDAVHKLKYENYTSSFFIRDIIKPDPPKN | | |
| RSK (SEQ ID | | LQLKPLKNSRQVEVSWEYPDTWSTPHSYFS | | |
| NO: 2734))- | | LTFCVQVQGKSKREKKDRVFTDKTSATVIC | | |
| FKBP (E31G, | | RKNASISVRAQDRYYSSSWSEWASVPCSGG | | |
| F36V, R71G, | | GGSGGGGSGGGGSRNLPVATPDPGMFPCL | | |
| K105E)-stop) | | HHSQNLLRAVSNMLQKARQTLEFYPCTSEE | | |
| | | IDHEDITKDKTSTVEACLPLELTKNESCLNS | | |
| | | RETSFITNGSCLASRKTSFMMALCLSSIYED | | |
| | | LKMYQVEFKTMNAKLLMDPKRQIFLDQN | | |
| | | MLAVIDELMQALNFNSETVPQKSSLEEPDF | | |
| | | YKTKIKLCILLHAFRIRAVTIDRVMSYLNAS | | |
| | | ESRRVRRNKRSKGVQVETISPGDGRTFPKR | | |
| | | GQTCVVHYTGMLGDGKKVDSSRDRNKPFK | | |
| | | FMLGKQEVIRGWEEGVAQMSVGQGAKLTI | | |
| | | SPDYAYGATGHPGIIPPHATLVFDVELLELE | | |
| | | * | | |
| OT-IL12-019 | PGK | MCHQQLVISWFSLVFLASPLVAIWELKKDV | 2789 | 5367 |
| (p40 signal | | YVVELDWYPDAPGEMVVLTCDTPEEDGIT | | |
| sequence-p40- | | WTLDQSSEVLGSGKTLTIQVKEFGDAGQYT | | |
| linker((G4S)3 | | CHKGGEVLSHSLLLLHKKEDGIWSTDILKD | | |
| (SEQ ID NO: | | QKEPKNKTFLRCEAKNYSGRFTCWWLTTIS | | |
| 2731))-p35- | | TDLTFSVKSSRGSSDPQGVTCGAATLSAER | | |
| stop) | | VRGDNKEYEYSVECQEDSACPAAEESLPIE | | |
| | | VMVDAVHKLKYENYTSSFFIRDIIKPDPPKN | | |
| | | LQLKPLKNSRQVEVSWEYPDTWSTPHSYFS | | |
| | | LTFCVQVQGKSKREKKDRVFTDKTSATVIC | | |
| | | RKNASISVRAQDRYYSSSWSEWASVPCSGG | | |
| | | GGSGGGGSGGGGSRNLPVATPDPGMFPCL | | |
| | | HHSQNLLRAVSNMLQKARQTLEFYPCTSEE | | |
| | | IDHEDITKDKTSTVEACLPLELTKNESCLNS | | |
| | | RETSFITNGSCLASRKTSFMMALCLSSIYED | | |
| | | LKMYQVEFKTMNAKLLMDPKRQIFLDQN | | |
| | | MLAVIDELMQALNFNSETVPQKSSLEEPDF | | |
| | | YKTKIKLCILLHAFRIRAVTIDRVMSYLNAS | | |
| | | * | | |
| OT-IL12-020 | EF1a | MCHQQLVISWFSLVFLASPLVAIWELKKDV | 2789 | 5367 |
| (p40 signal | | YVVELDWYPDAPGEMVVLTCDTPEEDGIT | | |
| sequence-p40- | | WTLDQSSEVLGSGKTLTIQVKEFGDAGQYT | | |
| linker((G4S)3 | | CHKGGEVLSHSLLLLHKKEDGIWSTDILKD | | |
| (SEQ ID NO: | | QKEPKNKTFLRCEAKNYSGRFTCWWLTTIS | | |
| 2731))-p35- | | TDLTFSVKSSRGSSDPQGVTCGAATLSAER | | |
| stop) | | VRGDNKEYEYSVECQEDSACPAAEESLPIE | | |
| | | VMVDAVHKLKYENYTSSFFIRDIIKPDPPKN | | |
| | | LQLKPLKNSRQVEVSWEYPDTWSTPHSYFS | | |
| | | LTFCVQVQGKSKREKKDRVFTDKTSATVIC | | |
| | | RKNASISVRAQDRYYSSSWSEWASVPCSGG | | |
| | | GGSGGGGSGGGGSRNLPVATPDPGMFPCL | | |
| | | HHSQNLLRAVSNMLQKARQTLEFYPCTSEE | | |
| | | IDHEDITKDKTSTVEACLPLELTKNESCLNS | | |
| | | RETSFITNGSCLASRKTSFMMALCLSSIYED | | |
| | | LKMYQVEFKTMNAKLLMDPKRQIFLDQN | | |
| | | MLAVIDELMQALNFNSETVPQKSSLEEPDF | | |
| | | YKTKIKLCILLHAFRIRAVTIDRVMSYLNAS | | |
| | | * | | |
| OT-IL12-021 | No promoter | MCHQQLVISWFSLVFLASPLVAIWELKKDV | 2789 | 5367 |
| (p40 signal | | YVVELDWYPDAPGEMVVLTCDTPEEDGIT | | |
| sequence-p40- | | WTLDQSSEVLGSGKTLTIQVKEFGDAGQYT | | |
| linker((G4S)3 | | CHKGGEVLSHSLLLLHKKEDGIWSTDILKD | | |
| (SEQ ID NO: | | QKEPKNKTFLRCEAKNYSGRFTCWWLTTIS | | |
| 2731))-p35- | | TDLTFSVKSSRGSSDPQGVTCGAATLSAER | | |
| stop) | | VRGDNKEYEYSVECQEDSACPAAEESLPIE | | |
| | | VMVDAVHKLKYENYTSSFFIRDIIKPDPPKN | | |
| | | LQLKPLKNSRQVEVSWEYPDTWSTPHSYFS | | |
| | | LTFCVQVQGKSKREKKDRVFTDKTSATVIC | | |
| | | RKNASISVRAQDRYYSSSWSEWASVPCSGG | | |
| | | GGSGGGGSGGGGSRNLPVATPDPGMFPCL | | |
| | | HHSQNLLRAVSNMLQKARQTLEFYPCTSEE | | |
| | | IDHEDITKDKTSTVEACLPLELTKNESCLNS | | |
| | | RETSFITNGSCLASRKTSFMMALCLSSIYED | | |
| | | LKMYQVEFKTMNAKLLMDPKRQIFLDQN | | |
| | | MLAVIDELMQALNFNSETVPQKSSLEEPDF | | |
| | | YKTKIKLCILLHAFRIRAVTIDRVMSYLNAS | | |
| | | * | | |
| OT-IL12-022 | PGK | MCHQQLVISWFSLVFLASPLVAIWELKKDV | 2788 | 5366 |
| (p40 signal | | YVVELDWYPDAPGEMVVLTCDTPEEDGIT | | |
| sequence-p40- | | WTLDQSSEVLGSGKTLTIQVKEFGDAGQYT | | |
| linker-((G4S)3 | | CHKGGEVLSHSLLLLHKKEDGIWSTDILKD | | |
| (SEQ ID NO: | | QKEPKNKTFLRCEAKNYSGRFTCWWLTTIS | | |
| 2731))-p35- | | TDLTFSVKSSRGSSDPQGVTCGAATLSAER | | |
| linker (GGSG | | VRGDNKEYEYSVECQEDSACPAAEESLPIE | | |
| (SEQ ID NO: | | VMVDAVHKLKYENYTSSFFIRDIIKPDPPKN | | |
| 2735))-FKBP | | LQLKPLKNSRQVEVSWEYPDTWSTPHSYFS | | |
| (E31G, F36V, | | LTFCVQVQGKSKREKKDRVFTDKTSATVIC | | |
| R71G, K105E)- | | RKNASISVRAQDRYYSSSWSEWASVPCSGG | | |
| stop) | | GGSGGGGSGGGGSRNLPVATPDPGMFPCL | | |
| | | HHSQNLLRAVSNMLQKARQTLEFYPCTSEE | | |
| | | IDHEDITKDKTSTVEACLPLELTKNESCLNS | | |
| | | RETSFITNGSCLASRKTSFMMALCLSSIYED | | |
| | | LKMYQVEFKTMNAKLLMDPKRQIFLDQN | | |
| | | MLAVIDELMQALNFNSETVPQKSSLEEPDF | | |
| | | YKTKIKLCILLHAFRIRAVTIDRVMSYLNAS | | |
| | | GGSGGVQVETISPGDGRTFPKRGQTCVVHY | | |
| | | TGMLGDGKKVDSSRDRNKPFKFMLGKQEV | | |
| | | IRGWEEGVAQMSVGQGAKLTISPDYAYGA | | |
| | | TGHPGIIPPHATLVFDVELLELE* | | |
| OT-IL12-023 | EF1a | MCHQQLVISWFSLVFLASPLVAIWELKKDV | 2788 | 5366 |
| (p40 signal | | YVVELDWYPDAPGEMVVLTCDTPEEDGIT | | |
| sequence-p40- | | WTLDQSSEVLGSGKTLTIQVKEFGDAGQYT | | |
| linker-((G4S)3 | | CHKGGEVLSHSLLLLHKKEDGIWSTDILKD | | |
| (SEQ ID NO: | | QKEPKNKTFLRCEAKNYSGRFTCWWLTTIS | | |
| 2731))-p35- | | TDLTFSVKSSRGSSDPQGVTCGAATLSAER | | |
| linker (GGSG | | VRGDNKEYEYSVECQEDSACPAAEESLPIE | | |
| (SEQ ID NO: | | VMVDAVHKLKYENYTSSFFIRDIIKPDPPKN | | |
| 2735))-FKBP | | LQLKPLKNSRQVEVSWEYPDTWSTPHSYFS | | |
| (E31G, F36V, | | LTFCVQVQGKSKREKKDRVFTDKTSATVIC | | |
| R71G, K105E)- | | RKNASISVRAQDRYYSSSWSEWASVPCSGG | | |
| stop) | | GGSGGGGSGGGGSRNLPVATPDPGMFPCL | | |
| | | HHSQNLLRAVSNMLQKARQTLEFYPCTSEE | | |
| | | IDHEDITKDKTSTVEACLPLELTKNESCLNS | | |
| | | RETSFITNGSCLASRKTSFMMALCLSSIYED | | |
| | | LKMYQVEFKTMNAKLLMDPKRQIFLDQN | | |
| | | MLAVIDELMQALNFNSETVPQKSSLEEPDF | | |
| | | YKTKIKLCILLHAFRIRAVTIDRVMSYLNAS | | |
| | | GGSGGVQVETISPGDGRTFPKRGQTCVVHY | | |
| | | TGMLGDGKKVDSSRDRNKPFKFMLGKQEV | | |
| | | IRGWEEGVAQMSVGQGAKLTISPDYAYGA | | |
| | | TGHPGIIPPHATLVFDVELLELE | | |
| OT-IL12-024 | No promoter | MCHQQLVISWFSLVFLASPLVAIWELKKDV | 2788 | 5366 |
| (p40 signal | | YVVELDWYPDAPGEMVVLTCDTPEEDGIT | | |
| sequence-p40- | | WTLDQSSEVLGSGKTLTIQVKEFGDAGQYT | | |
| linker-((G4S)3 | | CHKGGEVLSHSLLLLHKKEDGIWSTDILKD | | |
| (SEQ ID NO: | | QKEPKNKTFLRCEAKNYSGRFTCWWLTTIS | | |
| 2731))-p35- | | TDLTFSVKSSRGSSDPQGVTCGAATLSAER | | |
| linker (GGSG | | VRGDNKEYEYSVECQEDSACPAAEESLPIE | | |
| (SEQ ID NO: | | VMVDAVHKLKYENYTSSFFIRDIIKPDPPKN | | |
| 2735))-FKBP | | LQLKPLKNSRQVEVSWEYPDTWSTPHSYFS | | |
| (E31G, F36V, | | LTFCVQVQGKSKREKKDRVFTDKTSATVIC | | |
| R71G, K105E)- | | RKNASISVRAQDRYYSSSWSEWASVPCSGG | | |
| stop) | | GGSGGGGSGGGGSRNLPVATPDPGMFPCL | | |
| | | HHSQNLLRAVSNMLQKARQTLEFYPCTSEE | | |
| | | IDHEDITKDKTSTVEACLPLELTKNESCLNS | | |
| | | RETSFITNGSCLASRKTSFMMALCLSSIYED | | |
| | | LKMYQVEFKTMNAKLLMDPKRQIFLDQN | | |
| | | MLAVIDELMQALNFNSETVPQKSSLEEPDF | | |
| | | YKTKIKLCILLHAFRIRAVTIDRVMSYLNAS | | |
| | | GGSGGVQVETISPGDGRTFPKRGQTCVVHY | | |
| | | TGMLGDGKKVDSSRDRNKPFKFMLGKQEV | | |
| | | IRGWEEGVAQMSVGQGAKLTISPDYAYGA | | |
| | | TGHPGIIPPHATLVFDVELLELE* | | |
| OT-IL12-025 | PGK | MCHQQLVISWFSLVFLASPLVAIWELKKDV | 2788 | 5366 |
| (p40 signal | | YVVELDWYPDAPGEMVVLTCDTPEEDGIT | | |
| sequence-p40- | | WTLDQSSEVLGSGKTLTIQVKEFGDAGQYT | | |
| linker-((G4S)3 | | CHKGGEVLSHSLLLLHKKEDGIWSTDILKD | | |
| (SEQ ID NO: | | QKEPKNKTFLRCEAKNYSGRFTCWWLTTIS | | |
| 2731))-p35- | | TDLTFSVKSSRGSSDPQGVTCGAATLSAER | | |
| linker (GGSG | | VRGDNKEYEYSVECQEDSACPAAEESLPIE | | |
| (SEQ ID NO: | | VMVDAVHKLKYENYTSSFFIRDIIKPDPPKN | | |
| 2735))-FKBP | | LQLKPLKNSRQVEVSWEYPDTWSTPHSYFS | | |
| (E31G, F36V, | | LTFCVQVQGKSKREKKDRVFTDKTSATVIC | | |
| R71G, K105E)- | | RKNASISVRAQDRYYSSSWSEWASVPCSGG | | |
| stop) | | GGSGGGGSGGGGSRNLPVATPDPGMFPCL | | |
| | | HHSQNLLRAVSNMLQKARQTLEFYPCTSEE | | |
| | | IDHEDITKDKTSTVEACLPLELTKNESCLNS | | |
| | | RETSFITNGSCLASRKTSFMMALCLSSIYED | | |
| | | LKMYQVEFKTMNAKLLMDPKRQIFLDQN | | |
| | | MLAVIDELMQALNFNSETVPQKSSLEEPDF | | |
| | | YKTKIKLCILLHAFRIRAVTIDRVMSYLNAS | | |
| | | GGSGGVQVETISPGDGRTFPKRGQTCVVHY | | |
| | | TGMLGDGKKVDSSRDRNKPFKFMLGKQEV | | |
| | | IRGWEEGVAQMSVGQGAKLTISPDYAYGA | | |
| | | TGHPGIIPPHATLVFDVELLELE* | | |
| OT-IL12-026 | EF1a | MCHQQLVISWFSLVFLASPLVAIWELKKDV | 2788 | 5366 |
| (p40 signal | | YVVELDWYPDAPGEMVVLTCDTPEEDGIT | | |
| sequence-p40- | | WTLDQSSEVLGSGKTLTIQVKEFGDAGQYT | | |
| linker-((G4S)3 | | CHKGGEVLSHSLLLLHKKEDGIWSTDILKD | | |
| (SEQ ID NO: | | QKEPKNKTFLRCEAKNYSGRFTCWWLTTIS | | |
| 2731))-p35- | | TDLTFSVKSSRGSSDPQGVTCGAATLSAER | | |
| linker (GGSG | | VRGDNKEYEYSVECQEDSACPAAEESLPIE | | |
| (SEQ ID NO: | | VMVDAVHKLKYENYTSSFFIRDIIKPDPPKN | | |
| 2735))-FKBP | | LQLKPLKNSRQVEVSWEYPDTWSTPHSYFS | | |
| (E31G, F36V, | | LTFCVQVQGKSKREKKDRVFTDKTSATVIC | | |
| R71G, K105E)- | | RKNASISVRAQDRYYSSSWSEWASVPCSGG | | |
| stop) | | GGSGGGGSGGGGSRNLPVATPDPGMFPCL | | |
| | | HHSQNLLRAVSNMLQKARQTLEFYPCTSEE | | |
| | | IDHEDITKDKTSTVEACLPLELTKNESCLNS | | |
| | | RETSFITNGSCLASRKTSFMMALCLSSIYED | | |
| | | LKMYQVEFKTMNAKLLMDPKRQIFLDQN | | |
| | | MLAVIDELMQALNFNSETVPQKSSLEEPDF | | |
| | | YKTKIKLCILLHAFRIRAVTIDRVMSYLNAS | | |
| | | GGSGGVQVETISPGDGRTFPKRGQTCVVHY | | |
| | | TGMLGDGKKVDSSRDRNKPFKFMLGKQEV | | |
| | | IRGWEEGVAQMSVGQGAKLTISPDYAYGA | | |
| | | TGHPGIIPPHATLVFDVELLELE* | | |
| OT-IL 12-027 | No promoter | MCHQQLVISWFSLVFLASPLVAIWELKKDV | 2788 | 5366 |
| (p40 signal | | YVVELDWYPDAPGEMVVLTCDTPEEDGIT | | |
| sequence-p40- | | WTLDQSSEVLGSGKTLTIQVKEFGDAGQYT | | |
| linker-((G4S)3 | | CHKGGEVLSHSLLLLHKKEDGIWSTDILKD | | |
| (SEQ ID NO: | | QKEPKNKTFLRCEAKNYSGRFTCWWLTTIS | | |
| 2731))-p35- | | TDLTFSVKSSRGSSDPQGVTCGAATLSAER | | |
| linker (GGSG | | VRGDNKEYEYSVECQEDSACPAAEESLPIE | | |
| (SEQ ID NO: | | VMVDAVHKLKYENYTSSFFIRDIIKPDPPKN | | |
| 2735))-FKBP | | LQLKPLKNSRQVEVSWEYPDTWSTPHSYFS | | |
| (E31G, F36V, | | LTFCVQVQGKSKREKKDRVFTDKTSATVIC | | |
| R71G, K105E)- | | RKNASISVRAQDRYYSSSWSEWASVPCSGG | | |
| stop) | | GGSGGGGSGGGGSRNLPVATPDPGMFPCL | | |
| | | HHSQNLLRAVSNMLQKARQTLEFYPCTSEE | | |
| | | IDHEDITKDKTSTVEACLPLELTKNESCLNS | | |
| | | RETSFITNGSCLASRKTSFMMALCLSSIYED | | |
| | | LKMYQVEFKTMNAKLLMDPKRQIFLDQN | | |
| | | MLAVIDELMQALNFNSETVPQKSSLEEPDF | | |
| | | YKTKIKLCILLHAFRIRAVTIDRVMSYLNAS | | |
| | | GGSGGVQVETISPGDGRTFPKRGQTCVVHY | | |
| | | TGMLGDGKKVDSSRDRNKPFKFMLGKQEV | | |
| | | IRGWEEGVAQMSVGQGAKLTISPDYAYGA | | |
| | | TGHPGIIPPHATLVFDVELLELE* | | |
| OT-IL12-028 | PGK | MCHQQLVISWFSLVFLASPLVAIWELKKDV | 2787 | 5365 |
| (p40 signal | | YVVELDWYPDAPGEMVVLTCDTPEEDGIT | | |
| sequence-p40- | | WTLDQSSEVLGSGKTLTIQVKEFGDAGQYT | | |
| linker ((G4S)3 | | CHKGGEVLSHSLLLLHKKEDGIWSTDILKD | | |
| (SEQ ID NO: | | QKEPKNKTFLRCEAKNYSGRFTCWWLTTIS | | |
| 2731))-p35- | | TDLTFSVKSSRGSSDPQGVTCGAATLSAER | | |
| furin | | VRGDNKEYEYSVECQEDSACPAAEESLPIE | | |
| (ARNRQKRS | | VMVDAVHKLKYENYTSSFFIRDIIKPDPPKN | | |
| (SEQ ID NO: | | LQLKPLKNSRQVEVSWEYPDTWSTPHSYFS | | |
| 2733))-FKBP | | LTFCVQVQGKSKREKKDRVFTDKTSATVIC | | |
| (E31G, F36V, | | RKNASISVRAQDRYYSSSWSEWASVPCSGG | | |
| R71G, K105E)- | | GGSGGGGSGGGGSRNLPVATPDPGMFPCL | | |
| stop) | | HHSQNLLRAVSNMLQKARQTLEFYPCTSEE | | |
| | | IDHEDITKDKTSTVEACLPLELTKNESCLNS | | |
| | | RETSFITNGSCLASRKTSFMMALCLSSIYED | | |
| | | LKMYQVEFKTMNAKLLMDPKRQIFLDQN | | |
| | | MLAVIDELMQALNFNSETVPQKSSLEEPDF | | |
| | | YKTKIKLCILLHAFRIRAVTIDRVMSYLNAS | | |
| | | ARNRQKRSGVQVETISPGDGRTFPKRGQTC | | |
| | | VVHYTGMLGDGKKVDSSRDRNKPFKFML | | |
| | | GKQEVIRGWEEGVAQMSVGQGAKLTISPD | | |
| | | YAYGATGHPGIIPPHATLVFDVELLELE* | | |
| OT-IL12-029 | EF1a | MCHQQLVISWFSLVFLASPLVAIWELKKDV | 2792 | 5370 |
| (p40 signal | | YVVELDWYPDAPGEMVVLTCDTPEEDGIT | | |
| sequence-p40- | | WTLDQSSEVLGSGKTLTIQVKEFGDAGQYT | | |
| linker | | CHKGGEVLSHSLLLLHKKEDGIWSTDILKD | | |
| ((G4S)3 (SEQ | | QKEPKNKTFLRCEAKNYSGRFTCWWLTTIS | | |
| ID NO: 2731))- | | TDLTFSVKSSRGSSDPQGVTCGAATLSAER | | |
| p35-furin | | VRGDNKEYEYSVECQEDSACPAAEESLPIE | | |
| (ESRRVRRNK | | VMVDAVHKLKYENYTSSFFIRDIIKPDPPKN | | |
| RSK (SEQ ID | | LQLKPLKNSRQVEVSWEYPDTWSTPHSYFS | | |
| NO: 2734))- | | LTFCVQVQGKSKREKKDRVFTDKTSATVIC | | |
| FKBP (E31G, | | RKNASISVRAQDRYYSSSWSEWASVPCSGG | | |
| F36V, R71G, | | GGSGGGGSGGGGSRNLPVATPDPGMFPCL | | |
| K105E)-stop) | | HHSQNLLRAVSNMLQKARQTLEFYPCTSEE | | |
| | | IDHEDITKDKTSTVEACLPLELTKNESCLNS | | |
| | | RETSFITNGSCLASRKTSFMMALCLSSIYED | | |
| | | LKMYQVEFKTMNAKLLMDPKRQIFLDQN | | |
| | | MLAVIDELMQALNFNSETVPQKSSLEEPDF | | |
| | | YKTKIKLCILLHAFRIRAVTIDRVMSYLNAS | | |
| | | ESRRVRRNKRSKGVQVETISPGDGRTFPKR | | |
| | | GQTCVVHYTGMLGDGKKVDSSRDRNKPFK | | |
| | | FMLGKQEVIRGWEEGVAQMSVGQGAKLTI | | |
| | | SPDYAYGATGHPGIIPPHATLVFDVELLELE | | |
| | | * | | |
| OT-IL12-030 | No promoter | MCHQQLVISWFSLVFLASPLVAIWELKKDV | 2792 | 5370 |
| (p40 signal | | YVVELDWYPDAPGEMVVLTCDTPEEDGIT | | |
| sequence-p40- | | WTLDQSSEVLGSGKTLTIQVKEFGDAGQYT | | |
| linker | | CHKGGEVLSHSLLLLHKKEDGIWSTDILKD | | |
| ((G4S)3 (SEQ | | QKEPKNKTFLRCEAKNYSGRFTCWWLTTIS | | |
| ID NO: 2731))- | | TDLTFSVKSSRGSSDPQGVTCGAATLSAER | | |
| p35-furin | | VRGDNKEYEYSVECQEDSACPAAEESLPIE | | |
| (ESRRVRRNK | | VMVDAVHKLKYENYTSSFFIRDIIKPDPPKN | | |
| RSK (SEQ ID | | LQLKPLKNSRQVEVSWEYPDTWSTPHSYFS | | |
| NO: 2734))- | | LTFCVQVQGKSKREKKDRVFTDKTSATVIC | | |
| FKBP (E31G, | | RKNASISVRAQDRYYSSSWSEWASVPCSGG | | |
| F36V, R71G, | | GGSGGGGSGGGGSRNLPVATPDPGMFPCL | | |
| K105E)-stop) | | HHSQNLLRAVSNMLQKARQTLEFYPCTSEE | | |
| | | IDHEDITKDKTSTVEACLPLELTKNESCLNS | | |
| | | RETSFITNGSCLASRKTSFMMALCLSSIYED | | |
| | | LKMYQVEFKTMNAKLLMDPKRQIFLDQN | | |
| | | MLAVIDELMQALNFNSETVPQKSSLEEPDF | | |
| | | YKTKIKLCILLHAFRIRAVTIDRVMSYLNAS | | |
| | | ESRRVRRNKRSKGVQVETISPGDGRTFPKR | | |
| | | GQTCVVHYTGMLGDGKKVDSSRDRNKPFK | | |
| | | FMLGKQEVIRGWEEGVAQMSVGQGAKLTI | | |
| | | SPDYAYGATGHPGIIPPHATLVFDVELLELE | | |
| | | * | | |
| OT-IL12-046 | EF1a | MCHQQLVISWFSLVFLASPLVAGVQVETISP | 2784 | 5373 |
| (p40 signal | | GDGRTFPKRGQTCVVHYTGMLEDGKKVDS | | |
| sequence- | | SRDRNKPFKFMLGKQEVIRGWEEGVAQMS | | |
| FKBP(F36V, | | VGQRAKLTISPDYAYGATGHPGIIPPHATLV | | |
| L106P)- | | FDVELLKPEGGSGGIWELKKDVYVVELDW | | |
| Linker | | YPDAPGEMVVLTCDTPEEDGITWTLDQSSE | | |
| (GGSGG (SEQ | | VLGSGKTLTIQVKEFGDAGQYTCHKGGEVL | | |
| ID NO: 2729))- | | SHSLLLLHKKEDGIWSTDILKDQKEPKNKTF | | |
| p40-Linker | | LRCEAKNYSGRFTCWWLTTISTDLTFSVKSS | | |
| ((G4S)3 (SEQ | | RGSSDPQGVTCGAATLSAERVRGDNKEYE | | |
| ID NO: 2731))- | | YSVECQEDSACPAAEESLPIEVMVDAVHKL | | |
| p35-stop) | | KYENYTSSFFIRDIIKPDPPKNLQLKPLKNSR | | |
| | | QVEVSWEYPDTWSTPHSYFSLTFCVQVQGK | | |
| | | SKREKKDRVFTDKTSATVICRKNASISVRAQ | | |
| | | DRYYSSSWSEWASVPCSGGGGSGGGGSGG | | |
| | | GGSRNLPVATPDPGMFPCLHHSQNLLRAVS | | |
| | | NMLQKARQTLEFYPCTSEEIDHEDITKDKTS | | |
| | | TVEACLPLELTKNESCLNSRETSFITNGSCLA | | |
| | | SRKTSFMMALCLSSIYEDLKMYQVEFKTMN | | |
| | | AKLLMDPKRQIFLDQNMLAVIDELMQALNF | | |
| | | NSETVPQKSSLEEPDFYKTKIKLCILLHAFRI | | |
| | | RAVTIDRVMSYLNAS* | | |

[0594] In some embodiments, the IL12 may be a Flexi IL12, wherein both p35 and p40 subunits, are encoded by a single cDNA that produces a single chain polypeptide. The single chain polypeptide may be generated by placing p35 subunit at the N terminus or the c terminus of the single chain polypeptide. Similarly, the p40 subunit may be at the N terminus or C terminus of the single chain polypeptide. In some embodiments, the IL12 constructs of the invention may be placed under the transcriptional control of the CMV promoter (SEQ ID NO. 5374), an EF1a promoter (SEQ ID NO. 5375, and SEQ ID NO. 5376) or a PGK promoter (SEQ ID NO. 5377). Any portion of IL12 that retains one or more functions of full length or mature IL12 may be useful in the present invention. In some aspects, the DD-IL12 comprises the amino acid sequences listed in Table 24. The components signal sequences, linker, cleavage sites, payload and destabilizing domains may be assembled in any order to design constructs with optimal features. In some embodiments, such optimal features may include low to virtually no basal expression in the absence of the ligand and increased expression in the presence of ligand. In Table 24, the amino acid sequences may comprise a stop codon at the end which is denoted in the table with a “*”.

[0595] In some embodiments, DD regulated IL12 compositions of the invention may be utilized to minimize the cytotoxicities associated with systemic IL12 administration. Treatment with IL12 has been associated with systemic flu-like symptoms (fever, chills, fatigue, arthromyalgia, headache), toxic effects on the bone marrow, and liver. Hematologic toxicity observed most commonly included neutropenia and thrombocytopenia; hepatic dysfunction manifested in transient (dose dependent) increase in transaminases, hyperbilirubinemia and hypoalbuminemia. In some instances, toxicity is also associated with inflammation of the mucus membranes (oral mucositis, stomatitis or colitis). These toxic effects of IL12 were related to the secondary production of IFNgamma, TNFalpha, and chemokines such as IP10, and MIG. In certain aspects of the invention, DD regulated IL12 may be utilized to prevent the toxic effects associated with elevated production of secondary messengers.

[0596] The format of the IL12 constructs utilized as payload of the present invention may be optimized. In one embodiment, the payload of the invention may be a bicistronic IL12 containing p40 and p35 subunits separated by an internal ribosome entry site or a cleavage site such as P2A or Furin to allow independent expression of both subunits from a single vector. This results in a configuration of secreted IL12 that is more akin to the naturally occurring IL12 than the flexi IL12 construct, the payload of the invention may be the p40 subunit of the IL12. DD regulated p40 may be co-expressed with constitutive p35 construct to generate “regulatable IL12” expression. Alternatively, the DD regulated p40 may heterodimerize with the endogenous p35. p40 has been shown to stabilize p35 expression and stimulate the export of p35 (Jalah R, et al. (2013). Journal of Biol. Chem. 288, 6763-6776 (the contents of which are incorporated by reference in its entirety).

[0597] In some embodiments, modified forms of IL12 may be utilized as the payload. These modified forms of IL12 may be engineered to have shortened half-life in vivo compared to the non-modified form of especially when used in combination with tunable systems described herein.

[0598] Human flexi IL12 has a reported half-life of 5-19 hours which, when administered as a therapeutic compound, can result in systemic cytotoxicity (Car et al. (1999) The Toxicology of Interleukin-12: A Review” Toxicologic Path. 27 A, 58-63; Robertson et al. (1999) “Immunological Effects of Interleukin 12 Administered by Bolus Intravenous Injection to Patients with Cancer” Clin. Cancer Res. 5:9-16; Atkins et al. (1997) “Phase I Evaluation of Intravenous Recombinant Human Interleukin 12 in Patients with Advance Malignancies” Clin. Cancer Res. 3:409-417). The ligand inducible control of IL12 can regulate production in a dose dependent fashion, the time from cessation of ligand dosing to cessation of protein synthesis and IL12 clearance may be insufficient to prevent toxic accumulation of IL12 in plasma.

[0599] In one embodiment, the modified form of IL12 utilized as the payload may be a Topo-sc IL12 which have the configuration as follows from N to C terminus (i) a first IL12 p40 domain (p40N), (ii) an optional first peptide linker, (iii) an IL12 p35 domain, (iv) an optional second peptide linker, and (v) a second IL12 p40 domain (p40C). In one embodiment, modified topo sc IL12 polypeptides exhibit increased susceptibility to proteolysis. Topo-sc IL12 is described in International Patent Publication No. WO2016048903; the contents of which are incorporated herein by reference in its entirety.

[0600] IL12 polypeptide may also be modified (e.g. genetically, synthetically, or recombinantly engineered) to increase susceptibility to proteinases to reduce the biologically active half-life of the IL12 complex, compared to a corresponding IL12 lacking proteinases susceptibility. Proteinase susceptible forms of IL12 are described in International Patent Publication No. WO2017062953; the contents of which are incorporated by reference in its entirety.

[0601] IL12 systemic toxicity may also be limited or tightly controlled via mechanisms involving tethering IL12 to the cell surface to limit its therapeutic efficacy to the tumor site. Membrane tethered IL12 forms have been described previously using Glycosyl phosphatidylinositol (GPI) signal peptide or using CD80 transmembrane domain (Nagarajan S, et al. (2011) J Biomed Mater Res A. 99(3):410-7; Bozeman E N, et al. (2013) Vaccine. 7; 31(20):2449-56; Wen-Yu Pan et al. (2012), Mol. Ther. 20:5, 927-937; the contents of each of which are incorporated by reference in their entirety).

[0602] In one embodiment, the payload of the invention may comprise IL15. Interleukin 15 is a potent immune stimulatory cytokine and an essential survival factor for T cells, and Natural Killer cells. Preclinical studies comparing IL2 and IL15, have shown than IL15 is associated with less toxicity than IL2. In some embodiments, the effector module of the invention may be a DD-IL15 fusion polypeptide. IL15 polypeptide may also be modified to increase its binding affinity for the IL15 receptor. For example, the asparagine may be replaced by aspartic acid at position 72 of IL15 (SEQ ID NO. 2 of US patent publication US20140134128A1; the contents of which are incorporated by reference in their entirety). In some embodiments, the IL15 constructs of the invention may be placed under the transcriptional control of the CMV promoter (SEQ ID NO. 5378), an EF1a promoter (SEQ ID NO. 5379, SEQ ID NO. 5380) or a PGK promoter (SEQ ID NO. 5381). In some aspects, the DD-IL15 comprises the amino acid sequences listed in Table 25. The amino acid sequences in Table 25 may comprise a stop codon which is denoted in the table with a “*” at the end of the amino acid sequence.

TABLE 25
DD IL15 constructs

| | | | Amino | Nucleic |
|---|---|---|---|---|
| | | | Acid | Acid |
| | | | SEQ | SEQ |
| Description/ | Pro- | | ID | ID |
| Construct ID | moter | Amino Acid Sequence | NO | NO |
| IL2 signal sequence | — | MYRMQLLSCIALSLALVTNS | 2793 | 5382-5385 |
| IgE Leader | — | MDWTWILFLVAAATRVHS | 2794 | 5386-5388 |
| Linker | — | EFSTEF | 2795 | 5389-5390 |
| Linker | — | GGSGG | 2754 | 5391-5395 |
| HA Tag | — | YPYDVPDYA | 3080 | 5396-5398 |
| BamHI | — | GS | — | GGATCC |
| P2A Cleavable | — | GATNFSLLKQAGDVEENPGP | 3081 | 5399 |
| Peptide | | | | |
| mCherry (M1L) | — | LSKGEEDNMAIIKEFMRFKVHMEGSVNG | 2753 | 5400 |
| | | HEFEIEGEGEGRPYEGTQTAKLKVTKGGP | | |
| | | LPFAWDILSPQFMYGSKAYVKHPADIPDY | | |
| | | LKLSFPEGFKWERVMNFEDGGVVTVTQD | | |
| | | SSLQDGEFIYKVKLRGTNFPSDGPVMQKK | | |
| | | TMGWEASSERMYPEDGALKGEIKQRLKL | | |
| | | KDGGHYDAEVKTTYKAKKPVQLPGAYN | | |
| | | VNIKLDITSHNEDYTIVEQYERAEGRHSTG | | |
| | | GMDELYK | | |
| IL15 | — | NWVNVISDLKKIEDLIQSMHIDATLYTES | 2751 | 5401-5405 |
| | | DVHPSCKVTAMKCFLLELQVISLESGDASI | | |
| | | HDTVENLIILANNSLSSNGNVTESGCKECE | | |
| | | ELEEKNIKEFLQSFVHIVQMFINTS* | | |
| ecDHFR (Amino | — | ISLIAALAVDYVIGMENAMPWNLPADLA | 1174 | 5168-5173 |
| acid 2-159 of WT) | | WFKRNTLNKPVIMGRHTWESIGRPLPGRK | | |
| (R12Y, Y100I) | | NIILSSQPGTDDRVTWVKSVDEAIAACGD | | |
| | | VPEIMVIGGGRVIEQFLPKAQKLYLTHIDA | | |
| | | EVEGDTHFPDYEPDDWESVFSEFHDADA | | |
| | | QNSHSYCFEILERR* | | |
| hDHFR (Amino acid | — | VGSLNCIVAVSQNMGIGKNGDLPWPPLR | 1257 | 5160, 5178 |
| 2-187 of WT) | | NEFRYFQRMTTTSSVEGKQNLVIMGKKT | | |
| (Y122I) | | WFSIPEKNRPLKGRINLVLSRELKEPPQGA | | |
| | | HFLSRSLDDALKLTEQPELANKVDMVWI | | |
| | | VGGSSVIKEAMNHPGHLKLFVTRIMQDFE | | |
| | | SDTFFPEIDLEKYKLLPEYPGVLSDVQEEK | | |
| | | GIKYKFEVYEKND | | |
| OT-IL15-001 (IL2 | CMV | MYRMQLLSCIALSLALVTNSNWVNVISDL | 2796 | 5406 |
| signal sequence- | | KKIEDLIQSMHIDATLYTESDVHPSCKVTA | | |
| IL15-stop) | | MKCFLLELQVISLESGDASIHDTVENLIILA | | |
| | | NNSLSSNGNVTESGCKECEELEEKNIKEFL | | |
| | | QSFVHIVQMFINTS* | | |
| OT-IL15-002 (IL2 | CMV | MYRMQLLSCIALSLALVTNSEFSTEFISLIA | 2797 | 5407 |
| signal sequence- | | ALAVDYVIGMENAMPWNLPADLAWFKR | | |
| linker[EFSTEF (SEQ | | NTLNKPVIMGRHTWESIGRPLPGRKNIILS | | |
| ID NO: 3086)]- | | SQPGTDDRVTWVKSVDEAIAACGDVPEI | | |
| ecDHFR (amino acid | | MVIGGGRVIEQFLPKAQKLYLTHIDAEVE | | |
| 2-159 of WT, R12Y, | | GDTHFPDYEPDDWESVFSEFHDADAQNS | | |
| 100I)-linker | | HSYCFEILERRGGSGGNWVNVISDLKKIE | | |
| [GGSGG (SEQ ID | | DLIQSMHIDATLYTESDVHPSCKVTAMKC | | |
| NO: 2729)]-IL15- | | FLLELQVISLESGDASIHDTVENLIILANNS | | |
| stop) | | LSSNGNVTESGCKECEELEEKNIKEFLQSF | | |
| | | VHIVQMFINTS* | | |
| OT-IL15-062 (IgE | EF1a | MDWTWILFLVAAATRVHSYPYDVPDYA | 2798 | 5408 |
| leader-HA Tag- | | NWVNVISDLKKIEDLIQSMHIDATLYTES | | |
| IL15-BamHI (GS)- | | DVHPSCKVTAMKCFLLELQVISLESGDASI | | |
| stop) | | HDTVENLIILANNSLSSNGNVTESGCKECE | | |
| | | ELEEKNIKEFLQSFVHIVQMFINTSGS* | | |
| OT-IL15-132 (IgE | EF1a | MDWTWILFLVAAATRVHSNWVNVISDLK | 2799 | 5409 |
| leader-IL15- | | KIEDLIQSMHIDATLYTESDVHPSCKVTA | | |
| BamHI (GS)-P2A | | MKCFLLELQVISLESGDASIHDTVENLIILA | | |
| cleavable peptide- | | NNSLSSNGNVTESGCKECEELEEKNIKEFL | | |
| mCherry (M1L)- | | QSFVHIVQMFINTSGSGATNFSLLKQAGD | | |
| stop) | | VEENPGPLSKGEEDNMAIIKEFMRFKVHM | | |
| | | EGSVNGHEFEIEGEGEGRPYEGTQTAKLK | | |
| | | VTKGGPLPFAWDILSPQFMYGSKAYVKH | | |
| | | PADIPDYLKLSFPEGFKWERVMNFEDGGV | | |
| | | VTVTQDSSLQDGEFIYKVKLRGTNFPSDG | | |
| | | PVMQKKTMGWEASSERMYPEDGALKGEI | | |
| | | KQRLKLKDGGHYDAEVKTTYKAKKPVQ | | |
| | | LPGAYNVNIKLDITSHNEDYTIVEQYERA | | |
| | | EGRHSTGGMDELYK* | | |
| OT-IL15-134 (IgE | EF1a | MDWTWILFLVAAATRVHSNWVNVISDLK | 2800 | 5410 |
| leader-IL15- | | KIEDLIQSMHIDATLYTESDVHPSCKVTA | | |
| Linker (GS)- | | MKCFLLELQVISLESGDASIHDTVENLIILA | | |
| hDHFR (WT 2-187, | | NNSLSSNGNVTESGCKECEELEEKNIKEFL | | |
| Y122I)-BamHI | | QSFVHIVQMFINTSGSVGSLNCIVAVSQN | | |
| (GS)-P2A | | MGIGKNGDLPWPPLRNEFRYFQRMTTTSS | | |
| cleavable peptide- | | VEGKQNLVIMGKKTWFSIPEKNRPLKGRI | | |
| mCherry (M1L)- | | NLVLSRELKEPPQGAHFLSRSLDDALKLT | | |
| stop) | | EQPELANKVDMVWIVGGSSVIKEAMNHP | | |
| | | GHLKLFVTRIMQDFESDTFFPEIDLEKYKL | | |
| | | LPEYPGVLSDVQEEKGIKYKFEVYEKNDG | | |
| | | SGATNFSLLKQAGDVEENPGPLSKGEEDN | | |
| | | MAIIKEFMRFKVHMEGSVNGHEFEIEGEG | | |
| | | EGRPYEGTQTAKLKVTKGGPLPFAWDILS | | |
| | | PQFMYGSKAYVKHPADIPDYLKLSFPEGF | | |
| | | KWERVMNFEDGGVVTVTQDSSLQDGEFI | | |
| | | YKVKLRGTNFPSDGPVMQKKTMGWEAS | | |
| | | SERMYPEDGALKGEIKQRLKLKDGGHYD | | |
| | | AEVKTTYKAKKPVQLPGAYNVNIKLDITS | | |
| | | HNEDYTIVEQYERAEGRHSTGGMDELYK* | | |
| IL2 signal sequence | — | MYRMQLLSCIALSLALVTNS | 2793 | 5382-5385 |
| IgE Leader | — | MDWTWILFLVAAATRVHS | 2794 | 5386-5388 |
| Linker | — | EFSTEF | 2795 | 5389-5390 |
| Linker | — | GGSGG | 2754 | 5391-5395 |
| HA Tag | — | YPYDVPDYA | 3080 | 5396-5398 |
| BamHI | — | GS | - | GGATCC |
| P2A Cleavable | — | GATNFSLLKQAGDVEENPGP | 3081 | 5399 |
| Peptide | | | | |
| mCherry (M1L) | — | LSKGEEDNMAIIKEFMRFKVHMEGSVNG | 2753 | 5400 |
| | | HEFEIEGEGEGRPYEGTQTAKLKVTKGGP | | |
| | | LPFAWDILSPQFMYGSKAYVKHPADIPDY | | |
| | | LKLSFPEGFKWERVMNFEDGGVVTVTQD | | |
| | | SSLQDGEFIYKVKLRGTNFPSDGPVMQKK | | |
| | | TMGWEASSERMYPEDGALKGEIKQRLKL | | |
| | | KDGGHYDAEVKTTYKAKKPVQLPGAYN | | |
| | | VNIKLDITSHNEDYTIVEQYERAEGRHSTG | | |
| | | GMDELYK | | |
| IL15 | — | NWVNVISDLKKIEDLIQSMHIDATLYTES | 2751 | 5401-5405 |
| | | DVHPSCKVTAMKCFLLELQVISLESGDASI | | |
| | | HDTVENLIILANNSLSSNGNVTESGCKECE | | |
| | | ELEEKNIKEFLQSFVHIVQMFINTS* | | |
| ecDHFR (Amino | — | ISLIAALAVDYVIGMENAMPWNLPADLA | 1174 | 5168-5173 |
| acid 2-159 of WT) | | WFKRNTLNKPVIMGRHTWESIGRPLPGRK | | |
| (R12Y, Y100I) | | NIILSSQPGTDDRVTWVKSVDEAIAACGD | | |
| | | VPEIMVIGGGRVIEQFLPKAQKLYLTHIDA | | |
| | | EVEGDTHFPDYEPDDWESVFSEFHDADA | | |
| | | QNSHSYCFEILERR* | | |
| hDHFR (Amino acid | — | VGSLNCIVAVSQNMGIGKNGDLPWPPLR | 1257 | 5160, 5178 |
| 2-187 of WT) | | NEFRYFQRMTTTSSVEGKQNLVIMGKKT | | |
| (Y122I) | | WFSIPEKNRPLKGRINLVLSRELKEPPQGA | | |
| | | HFLSRSLDDALKLTEQPELANKVDMVWI | | |
| | | VGGSSVIKEAMNHPGHLKLFVTRIMQDFE | | |
| | | SDTFFPEIDLEKYKLLPEYPGVLSDVQEEK | | |
| | | GIKYKFEVYEKND | | |
| OT-IL15-001 (IL2 | CMV | MYRMQLLSCIALSLALVTNSNWVNVISDL | 2796 | 5406 |
| signal sequence- | | KKIEDLIQSMHIDATLYTESDVHPSCKVTA | | |
| IL15-stop) | | MKCFLLELQVISLESGDASIHDTVENLIILA | | |
| | | NNSLSSNGNVTESGCKECEELEEKNIKEFL | | |
| | | QSFVHIVQMFINTS* | | |
| OT-IL15-002 (IL2 | CMV | MYRMQLLSCIALSLALVTNSEFSTEFISLIA | 2797 | 5407 |
| signal sequence- | | ALAVDYVIGMENAMPWNLPADLAWFKR | | |
| linker[EFSTEF (SEQ | | NTLNKPVIMGRHTWESIGRPLPGRKNIILS | | |
| ID NO: 3086)]- | | SQPGTDDRVTWVKSVDEAIAACGDVPEI | | |
| ecDHFR (amino acid | | MVIGGGRVIEQFLPKAQKLYLTHIDAEVE | | |
| 2-159 of WT, R12Y, | | GDTHFPDYEPDDWESVFSEFHDADAQNS | | |
| 100I)-linker | | HSYCFEILERRGGSGGNWVNVISDLKKIE | | |
| [GGSGG (SEQ ID | | DLIQSMHIDATLYTESDVHPSCKVTAMKC | | |
| NO: 2729)]-IL15- | | FLLELQVISLESGDASIHDTVENLIILANNS | | |
| stop) | | LSSNGNVTESGCKECEELEEKNIKEFLQSF | | |
| | | VHIVQMFINTS* | | |
| OT-IL15-062 (IgE | EF1a | MDWTWILFLVAAATRVHSYPYDVPDYA | 2798 | 5408 |
| leader-HA Tag- | | NWVNVISDLKKIEDLIQSMHIDATLYTES | | |
| IL15-BamHI (GS)- | | DVHPSCKVTAMKCFLLELQVISLESGDASI | | |
| stop) | | HDTVENLIILANNSLSNGNVTESGCKECE | | |
| | | ELEEKNIKEFLQSFVHIVQMFINTSGS* | | |
| OT-IL15-132 (IgE | EF1a | MDWTWILFLVAAATRVHSNWVNVISDLK | 2799 | 5409 |
| leader-IL15- | | KIEDLIQSMHIDATLYTESDVHPSCKVTA | | |
| BamHI (GS)-P2A | | MKCFLLELQVISLESGDASIHDTVENLIILA | | |
| cleavable peptide- | | NNSLSSNGNVTESGCKECEELEEKNIKEFL | | |
| mCherry (M1L)- | | QSFVHIVQMFINTSGSGATNFSLLKQAGD | | |
| stop) | | VEENPGPLSKGEEDNMAIIKEFMRFKVHM | | |
| | | EGSVNGHEFEIEGEGEGRPYEGTQTAKLK | | |
| | | VTKGGPLPFAWDILSPQFMYGSKAYVKH | | |
| | | PADIPDYLKLSFPEGFKWERVMNFEDGGV | | |
| | | VTVTQDSSLQDGEFIYKVKLRGTNFPSDG | | |
| | | PVMQKKTMGWEASSERMYPEDGALKGEI | | |
| | | KQRLKLKDGGHYDAEVKTTYKAKKPVQ | | |
| | | LPGAYNVNIKLDITSHNEDYTIVEQYERA | | |
| | | EGRHSTGGMDELYK* | | |
| OT-IL15-134 (IgE | EF1a | MDWTWILFLVAAATRVHSNWVNVISDLK | 2800 | 5410 |
| leader-IL15- | | KIEDLIQSMHIDATLYTESDVHPSCKVTA | | |
| Linker (GS)- | | MKCFLLELQVISLESGDASIHDTVENLIILA | | |
| hDHFR (WT 2-187, | | NNSLSSNGNVTESGCKECEELEEKNIKEFL | | |
| Y122I)-BamHI | | QSFVHIVQMFINTSGSVGSLNCIVAVSQN | | |
| (GS)-P2A | | MGIGKNGDLPWPPLRNEFRYFQRMTTTSS | | |
| cleavable peptide- | | VEGKQNLVIMGKKTWFSIPEKNRPLKGRI | | |
| mCherry (M1L)— | | NLVLSRELKEPPQGAHFLSRSLDDALKLT | | |
| stop) | | EQPELANKVDMVWIVGGSSVIKEAMNHP | | |
| | | GHLKLFVTRIMQDFESDTFFPEIDLEKYKL | | |
| | | LPEYPGVLSDVQEEKGIKYKFEVYEKNDG | | |
| | | SGATNFSLLKQAGDVEENPGPLSKGEEDN | | |
| | | MAIIKEFMRFKVHMEGSVNGHEFEIEGEG | | |
| | | EGRPYEGTQTAKLKVTKGGPLPFAWDILS | | |
| | | PQFMYGSKAYVKHPADIPDYLKLSFPEGF | | |
| | | KWERVMNFEDGGVVTVTQDSSLQDGEFI | | |
| | | YKVKLRGTNFPSDGPVMQKKTMGWEAS | | |
| | | SERMYPEDGALKGEIKQRLKLKDGGHYD | | |
| | | AEVKTTYKAKKPVQLPGAYNVNIKLDITS | | |
| | | HNEDYTIVEQYERAEGRHSTGGMDELYK* | | |

[0603] In one embodiment, the payload of the invention may comprise whole or a portion of IL15. Interleukin 15 is a potent immune stimulatory cytokine and an essential survival factor for T cells, and Natural Killer cells. Preclinical studies comparing IL2 and IL15, have shown than IL15 is associated with less toxicity than IL2. In some embodiments, the effector module of the invention may be a DD-IL15 fusion polypeptide. IL15 polypeptide may also be modified to increase its binding affinity for the IL15 receptor. For example, the asparagine may be replaced by aspartic acid at position 72 of IL15 (SEQ. ID NO. 2 of US patent publication US20140134128A1; the contents of which are incorporated by reference in their entirety). In some embodiments, the IL15 constructs of the invention may be placed under the transcriptional control of the CMV promoter (SEQ. ID NO. 5411), an EF1a promoter (SEQ. ID NO. 5412 or SEQ. ID NO. 5413) or a PGK promoter (SEQ. ID NO. 5414). Any portion of IL15 that retains one or more functions of full length or mature IL15 may be useful in the present invention. Such functions include the promotion of NK cell survival, regulation of NK cell and T cell activation and proliferation as well as the support of NK cell development from hematopoietic stem cells. In some aspects, the DD-IL15 comprises the amino acid sequences listed in Table 26. The amino acid sequences in Table 26 may comprise a stop codon which is denoted in the table with a at the end of the amino acid sequence.

TABLE 26
IL15 constructs

| | | | | Nucleic |
|---|---|---|---|---|
| | | | Amino | Acid SEQ |
| | Pro- | | Acid SEQ | ID NO/ |
| Description | moter | Amino acid sequence | ID NO | Sequence |
| IL2 signal | — | MYRMQLLSCIALSLALVTNS | 2801 | 5415-5418 |
| sequence | | | | |
| IgE leader | — | MDWTWILFLVAAATRVHS | 2802 | 5419-5421 |
| Linker | — | EFSTEF | 2803 | 5422-5423 |
| Linker | — | GGSGG | 2804 | 5424-5428 |
| HA Tag | | YPYDVPDYA | 2805 | 5429-5430 |
| BamHI | — | GS | — | GGATCC |
| P2A | — | GATNFSLLKQAGDVEENPGP | 2806 | 5431 |
| Cleavable | | | | |
| Peptide | | | | |
| mCherry | — | LSKGEEDNMAIIKEFMRFKVHMEGSVNG | 2807 | 5432 |
| (M1L) | | HEFEIEGEGEGRPYEGTQTAKLKVTKGG | | |
| | | PLPFAWDILSPQFMYGSKAYVKHPADIP | | |
| | | DYLKLSFPEGFKWERVMNFEDGGVVTVT | | |
| | | QDSSLQDGEFIYKVKLRGTNFPSDGPVM | | |
| | | QKKTMGWEASSERMYPEDGALKGEIKQR | | |
| | | LKLKDGGHYDAEVKTTYKAKKPVQLPGA | | |
| | | YNVNIKLDITSHNEDYTIVEQYERAEGR | | |
| | | HSTGGMDELYK | | |
| IL15 | — | NWVNVISDLKKIEDLIQSMHIDATLYTE | 718 | 5434-5436 |
| | | SDVHPSCKVTAMKCFLLELQVISLESGD | | (each |
| | | ASIHDTVENLIILANNSLSSNGNVTESG | | include the |
| | | CKECEELEEKNIKEFLQSFVHIVQMFIN | | stop codon |
| | | TS* | | at the end), |
| | | | | 5437-5439 |
| ecDHFR | — | ISLIAALAVDYVIGMENAMPWNLPADLA | 2808 | 5440-5442 |
| (Amino acid | | WFKRNTLNKPVIMGRHTWESIGRPLPGR | | |
| 2-159 of | | KNIILSSQPGTDDRVTWVKSVDEAIAAC | | |
| WT; R12Y, | | GDVPEIMVIGGGRVIEQFLPKAQKLYLT | | |
| Y100I) | | HIDAEVEGDTHFPDYEPDDWESVFSEFH | | |
| | | DADAQNSHSYCFEILERR* | | |
| hDHFR | — | VGSLNCIVAVSQNMGIGKNGDLPWPPLR | 2809 | 5443 |
| (Amino acid | | NEFRYFQRMTTTSSVEGKQNLVIMGKKT | | |
| 2-187 of | | WFSIPEKNRPLKGRINLVLSRELKEPPQ | | |
| WT) | | GAHFLSRSLDDALKLTEQPELANKVDMV | | |
| (Y122I) | | WIVGGSSVIKEAMNHPGHLKLFVTRIMQ | | |
| | | DFESDTFFPEIDLEKYKLLPEYPGVLSD | | |
| | | VQEEKGIKYKFEVYEKND | | |
| OT-IL15- | CMV | MYRMQLLSCIALSLALVTNSNWVNVISD | 2810 | 5444 |
| 001 (IL2 | | LKKIEDLIQSMHIDATLYTESDVHPSCK | | |
| signal | | VTAMKCFLLELQVISLESGDASIHDTVE | | |
| sequence- | | NLIILANNSLSSNGNVTESGCKECEELE | | |
| IL15-stop) | | EKNIKEFLQSFVHIVQMFINTS* | | |
| OT-IL15- | CMV | MYRMQLLSCIALSLALVTNSEFSTEFIS | 2811 | 5445 |
| 002 (IL2 | | LIAALAVDYVIGMENAMPWNLPADLAWF | | |
| signal | | KRNTLNKPVIMGRHTWESIGRPLPGRKN | | |
| sequence- | | IILSSQPGTDDRVTWVKSVDEAIAACGD | | |
| linker[EFST | | VPEIMVIGGGRVIEQFLPKAQKLYLTHI | | |
| EF (SEQ ID | | DAEVEGDTHFPDYEPDDWESVFSEFHDA | | |
| NO: 3086)]- | | DAQNSHSYCFEILERRGGSGGNWVNVIS | | |
| ecDHFR | | DLKKIEDLIQSMHIDATLYTESDVHPSC | | |
| (amino acid | | KVTAMKCFLLELQVISLESGDASIHDTV | | |
| 2-159 of | | ENLIILANNSLSSNGNVTESGCKECEEL | | |
| WT, R12Y, | | EEKNIKEFLQSFVHIVQMFINTS* | | |
| 100I)-linker | | | | |
| [GGSGG | | | | |
| (SEQ ID | | | | |
| NO: 2729)]- | | | | |
| IL15-stop) | | | | |
| OT-IL15- | EF1a | MDWTWILFLVAAATRVHSYPYDVPDYAN | 2812 | 5446 |
| 062 (IgE | | WVNVISDLKKIEDLIQSMHIDATLYTES | | |
| leader-HA | | DVHPSCKVTAMKCFLLELQVISLESGDA | | |
| Tag-IL15- | | SIHDTVENLIILANNSLSSNGNVTESGC | | |
| BamHI | | KECEELEEKNIKEFLQSFVHIVQMFINT | | |
| (GS)-stop) | | SGS* | | |
| OT-IL15- | EF1a | MDWTWILFLVAAATRVHSNWVNVISDLK | 2813 | 5447 |
| 132 (IgE | | KIEDLIQSMHIDATLYTESDVHPSCKVT | | |
| leader-IL15- | | AMKCFLLELQVISLESGDASIHDTVENL | | |
| BamHI | | IILANNSLSSNGNVTESGCKECEELEEK | | |
| (GS)-P2A | | NIKEFLQSFVHIVQMFINTSGSGATNFS | | |
| cleavable | | LLKQAGDVEENPGPLSKGEEDNMAIIKE | | |
| peptide- | | FMRFKVHMEGSVNGHEFEIEGEGEGRPY | | |
| mCherry | | EGTQTAKLKVTKGGPLPFAWDILSPQFM | | |
| (M1L)- | | YGSKAYVKHPADIPDYLKLSFPEGFKWE | | |
| stop) | | RVMNFEDGGVVTVTQDSSLQDGEFIYKV | | |
| | | KLRGTNFPSDGPVMQKKTMGWEASSERM | | |
| | | YPEDGALKGEIKQRLKLKDGGHYDAEVK | | |
| | | TTYKAKKPVQLPGAYNVNIKLDITSHNE | | |
| | | DYTIVEQYERAEGRHSTGGMDELYK* | | |
| OT-IL15- | EF1a | MDWTWILFLVAAATRVHSNWVNVISDLKK | 2814 | 5448 |
| 134 (IgE | | IEDLIQSMHIDATLYTESDVHPSCKVTAM | | |
| leader-IL15- | | KCFLLELQVISLESGDASIHDTVENLIIL | | |
| Linker | | ANNSLSSNGNVTESGCKECEELEEKNIKE | | |
| (GS- | | FLQSFVHIVQMFINTSGSVGSLNCIVAVS | | |
| hDHFR | | QNMGIGKNGDLPWPPLRNEFRYFQRMTTT | | |
| (WT 2-187, | | SSVEGKQNLVIMGKKTWFSIPEKNRPLKG | | |
| Y122I)- | | RINLVLSRELKEPPQGAHFLSRSLDDALK | | |
| BamHI (GS)- | | LTEQPELANKVDMVWIVGGSSVIKEAMNH | | |
| P2A | | PGHLKLFVTRIMQDFESDTFFPEIDLEKY | | |
| cleavable | | KLLPEYPGVLSDVQEEKGIKYKFEVYEKN | | |
| peptide- | | DGSGATNFSLLKQAGDVEENPGPLSKGEE | | |
| mCherry | | DNMAIIKEFMRFKVHMEGSVNGHEFEIEG | | |
| (M1L)- | | EGEGRPYEGTQTAKLKVTKGGPLPFAWDI | | |
| stop) | | LSPQFMYGSKAYVKHPADIPDYLKLSFPE | | |
| | | GFKWERVMNFEDGGVVTVTQDSSLQDGEF | | |
| | | IYKVKLRGTNFPSDGPVMQKKTMGWEASS | | |
| | | ERMYPEDGALKGEIKQRLKLKDGGHYDAE | | |
| | | VKTTYKAKKPVQLPGAYNVNIKLDITSHN | | |
| | | EDYTIVEQYERAEGRHSTGGMDELYK* | | |

[0604] In some instances, whole or a portion of the IL15 is linked to the whole or a portion of one or more transmembrane proteins. In some embodiments, the transmembrane domain of the present invention may be selected from the group consisting of a CD8a transmembrane domain, a CD4 transmembrane domain, a CD 28 transmembrane domain, a CTLA-4 transmembrane domain, a PD-1 transmembrane domain, and a human IgG4Fc region. As non-limiting examples, the transmembrane domain may be a CTLA-4 transmembrane domain comprising the amino acid sequences of SEQ ID NOs. 1-5 of International Patent Publication NO. WO2014100385; and a PD-1 transmembrane domain comprising the amino acid sequences of SEQ ID NOs. 6-8 of International Patent Publication NO. WO2014100385; the contents of each of which are incorporated herein by reference in their entirety.

[0605] In some embodiments, the payloads of the present invention may comprise an optional hinge region (also called spacer). A hinge sequence is a short sequence of amino acids that facilitates flexibility of the extracellular targeting domain that moves the target binding domain away from the effector cell surface to enable proper cell/cell contact, target binding and effector cell activation (Patel et al., Gene Therapy, 1999; 6: 412-419). The hinge sequence can be any suitable sequence derived or obtained from any suitable molecule. The hinge sequence may be derived from all or part of an immunoglobulin (e.g., IgG1, IgG2, IgG3, IgG4) hinge region, i.e., the sequence that falls between the CH1 and CH2 domains of an immunoglobulin, e.g., an IgG4 Fc hinge, the extracellular regions of type 1 membrane proteins such as CD8a CD4, CD28 and CD7, which may be a wild type sequence or a derivative. Some hinge regions include an immunoglobulin CH3 domain or both a CH3 domain and a CH2 domain. In certain embodiments, the hinge region may be modified from an IgG1, IgG2, IgG3, or IgG4 that includes one or more amino acid residues, for example, 1, 2, 3, 4 or 5 residues, substituted with an amino acid residue different from that present in an unmodified hinge.

[0606] In some embodiments, transmembrane domains may be selected from any of those described in Table 15.

[0607] Hinge region sequences useful in the present invention are provided in Table 16.

[0608] Hinge and transmembrane region sequences useful in the present invention are provided in Table 17.

[0609] In some embodiments, the payloads of the present invention may comprise one or more linkers. The linker may be between 1-30 amino acids long. In this regard, the linker may be 1, 2, 3, 4, 5, 6, 7, 8, 9, 10, 11, 12, 13, 14, 15, 16, 17, 18, 19, 20, 21, 22, 23, 24, 25, 26, 27, 28, 29 or 30 amino acids in length. In other embodiments, the linker may be flexible.

[0610] The effector modules containing DD-IL15 may be designed to be secreted (using e.g. IL2 signal sequence) or membrane bound (using e.g. IgE or CD8a signal sequence).

[0611] A unique feature of IL15 mediated activation is the mechanism of trans-presentation in which IL15 is presented as a complex with the alpha subunit of IL15 receptor (IL15Rα) that binds to and activates membrane bound IL15 beta/gamma receptor, either on the same cell or a different cell. The IL15/IL15Ra complex is more effective in activating IL15 signaling, than IL15 by itself. Thus, in some embodiments, the effector module of the invention may include a DD-IL15/IL15Ra fusion polypeptide. In some embodiments, the payload of the invention may be a whole or a portion of IL15 fused to the whole or a portion of the IL15Rα. Any portion of IL15 and IL15Ra that retains one or more functions of full length or mature IL15 or IL15Ra respectively may be useful in the present invention. Such functions include the promotion of NK cell survival, regulation of NK cell and T cell activation and proliferation as well as the support of NK cell development from hematopoietic stem cells. In one embodiment, the payload may be IL15/IL15Ra fusion polypeptide described in US Patent Publication NO.: US20160158285A1 (the contents of which are incorporated herein by reference in their entirety). The IL15 receptor alpha comprises an extracellular domain called the sushi domain which contains most of the structural elements necessary for binding to IL15. Thus, in some embodiments, payload may include IL15Ra sushi domain. As a non-limiting example, the IL15Ra sushi domain may comprise the amino acid sequence of SEQ. ID NO. 14 of US20090238791A1 (the contents of which are incorporated herein by reference in their entirety). In one embodiment, the payload of the invention maybe the IL15 fused to IL15Ra sushi domain fusion polypeptide described in US Patent Publication NO. US20090238791A1. A portion of IL15Ra useful in the invention may include 31-205 amino acids or 31-95 amino acids of the human IL15Ra (Uniprot ID: Q13261). Table 27 provides IL15Ra variants useful in the invention. In some embodiments, payload may be the IL15/IL15Ra sushi domain fusion polypeptide described in US Patent Publication NO.: US20090238791A1 (the contents of which are incorporated herein by reference in their entirety).

TABLE 27
IL15Ra variants

| | | Amino |
|---|---|---|
| | | acid SEQ |
| Description | Sequence | ID |
| IL15Ra Isoform 1 (NCBI | MAPRRARGCRTLGLPALLLLLLLRPPATRGITCPPPMSVEH | 719 |
| Reference No. | ADIWVKSYSLYSRERYICNSGFKRKAGTSSLTECVLNKAT | |
| NP_002180.1) | NVAHWTTPSLKCIRDPALVHQRPAPPSTVTTAGVTPQPES | |
| | LSPSGKEPAASSPSSNNTAATTAAIVPGSQLMPSKSPSTGT | |
| | TEISSHESSHGTPSQTTAKNWELTASASHQPPGVYPQGHS | |
| | DTTVAISTSTVLLCGLSAVSLLACYLKSRQTPPLASVEMEA | |
| | MEALPVTWGTSSRDEDLENCSHHL | |
| IL15Ra Isoform 2 (NCBI | MAPRRARGCRTLGLPALLLLLLLRPPATRGITCPPPMSVEH | 720 |
| reference No. | ADIWVKSYSLYSRERYICNSGFKRKAGTSSLTECVLNKAT | |
| NP_751950.2) | NVAHWTTPSLKCIKPAASSPSSNNTAATTAAIVPGSQLMP | |
| | SKSPSTGTTEISSHESSHGTPSQTTAKNWELTASASHQPPG | |
| | VYPQGHSDTTVAISTSTVLLCGLSAVSLLACYLKSRQTPPL | |
| | ASVEMEAMEALPVTWGTSSRDEDLENCSHHL | |
| IL15Ra Isoform 3 (NCBI | MSVEHADIWVKSYSLYSRERYICNSGFKRKAGTSSLTECV | 721 |
| Reference No. | LNKATNVAHWTTPSLKCIRDPALVHQRPAPPSTVTTAGVT | |
| NP_001230468.1) | PQPESLSPSGKEPAASSPSSNNTAATTAAIVPGSQLMPSKSP | |
| | STGTTEISSHESSHGTPSQTTAKNWELTASASHQPPGVYPQ | |
| | GHSDTTVAISTSTVLLCGLSAVSLLACYLKSRQTPPLASVE | |
| | MEAMEALPVTWGTSSRDEDLENCSHHL | |
| IL15Ra Isoform 4 (NCBI | MRLAGRQVPEQRSPPPPGLGSARPGSPAVSCGAAAMAPR | 722 |
| Reference No. | RARGCRTLGLPALLLLLLLRPPATRDARDRLAVLAGRSRI | |
| NP_001243694.1) | SESFNHEVQTHEACVRLRTMENCPQCHHHRTSRQQAGIT | |
| | CPPPMSVEHADIWVKSYSLYSRERYICNSGFKRKAGTSSL | |
| | TECVLNKATNVAHWTTPSLKCIRDPALVHQRPAPPSTVTT | |
| | AGVTPQPESLSPSGKEPAASSPSSNNTAATTAAIVPGSQLM | |
| | PSKSPSTGTTEISSHESSHGTPSQTTAKNWELTASASHQPP | |
| | GVYPQGHSDTTVAISTSTVLLCGLSAVSLLACYLKSRQTPP | |
| | LASVEMEAMEALPVTWGTSSRDEDLENCSHHL | |
| IL15Ra sushi domain | CPPPMSVEHADIWVKSYSLYSRERYICNSGFKRKAGTSSL | 723 |
| | TECVLNKATNVAHWTTPSLKC | |
| IL15Ra (without signal | ITCPPPMSVEHADIWVKSYSLYSRERYICNSGFKRKAGTSS | 724 |
| sequence) | LTECVLNKATNVAHWTTPSLKCIRDPALVHQRPAPPSTVT | |
| | TAGVTPQPESLSPSGKEPAASSPSSNNTAATTAAIVPGSQL | |
| | MPSKSPSTGTTEISSHESSHGTPSQTTAKNWELTASASHQP | |
| | PGVYPQGHSDTTVAISTSTVLLCGLSAVSLLACYLKSRQTP | |
| | PLASVEMEAMEALPVTWGTSSRDEDLENCSHHL | |
| IL15Ra (31-205 of Uniprot | ITCPPPMSVEHADIWVKSYSLYSRERYICNSGFKRKAGTSS | 725 |
| ID: Q13261.1) | LTECVLNKATNVAHWTTPSLKCIRDPALVHQRPAPPSTVT | |
| | TAGVTPQPESLSPSGKEPAASSPSSNNTAATTAAIVPGSQL | |
| | MPSKSPSTGTTEISSHESSHGTPSQTTAKNWELTASASHQP | |
| | PGVYPQGHSDTT | |
| IL15Ra (31-95 of | ITCPPPMSVEHADIWVKSYSLYSRERYICNSGFKRKAGTSS | 726 |
| Q13261.1) | LTECVLNKATNVAHWTTPSLKCIR | |

[0612] IL15/IL15Ra fusion proteins of the present invention may be linked to all or a functional portion of one or more transmembrane proteins. In some embodiments, an optional hinge region may be included. Tables 15, Table 16 and Table 17 provide various transmembrane regions, hinge and transmembrane with hinge regions that can be linked to the payloads described herein.

[0613] The whole or a portion of the membrane associated IL15 or IL15/IL15Ra fusion polypeptides of the invention may be shed into the extracellular space. Shedding as used herein refers to the release of membrane associated biomolecules from the membrane to which they are tethered. In some instances, shedding may be induced by the proteolytic cleavage. A soluble form of human IL15Ra arises from proteolytic shedding of the membrane-anchored receptor has been reported by Mortier et al (Mortier E et al. (2004). J Immunol.; 173(3):1681-8; the contents of which are incorporated by reference in their entirety). Shedding may also be induced by treatment with PMA, ionomycin, and to a lesser extent by IL1b and TNFa. In some instances, IL15 or IL15/IL15Ra fusion proteins may be modified to prevent shedding. For example, the IL15 molecule or the IL15Ra molecule may be truncated or mutated to remove presumable cleavage sites. IL15Ra has a cleavage site (PQGHSDTT from the position 168 to 175 of SEQ. ID NO. 724) in the extracellular domain immediately distal to the transmembrane domain of the receptor, as described by Bergamaschi C et al. (2008). J Biol Chem; 283(7):4189-99; Anthony S M et al. (2015). PLoS One. 10(3): e0120274), and International Patent Application Publication Nos. WO2014066527 and WO2009002562 (the contents of each of which are incorporated herein by reference in their entirety.) Tumor necrosis factor-alpha-converting enzyme (TACE/ADAM17) has been implicated as a protease that cleaves between glycine (at the position 170 of Seq. ID NO. 724) and histidine (at the position 171 of SEQ. ID NO. 724) and generates a naturally occurring soluble form of IL15Ra. The same mechanism may be responsible for the IL15-IL15Ra shedding. Hence, the cleavage site of IL15Ra may be mutated such that cleavage by an endogenous protease is prevented. The mutation of the cleavage site may be introduced by substitution, insertion or deletion of amino acid residues. The IL15-IL15Ra fusion molecule may be also modified such that the full-length or truncated IL15-IL15Ra fusion molecule is fused to heterologous hinge domains and/or heterologous transmembrane domains. As non-limiting examples, variants of IL15Ra described in SEQ. ID NO. 5449, 5451 and 7185 can be utilized. Additionally, the length and sequence of the linkers that connect IL15 and IL15Ra may be modified.

[0614] DD-IL15/IL15Ra fusion proteins of the present invention may be expressed as a single polypeptide connected to a CAR, as described in International Patent Application Publication No. WO2016210293, the contents of which are incorporated herein by reference in their entirety. A cleavage site may be disposed between the CAR polypeptide and DD-IL15/IL15Ra fusion polypeptide. The example of a cleavage site includes 2A self-cleaving peptides, such as porcine teschovirus-1 2A (P2A), thoseaasigna virus 2A (T2A), equine rhinitis A virus 2A (E2A), foot and mouth disease virus 2A (F2A), cytoplasmic polyhedrosis virus (BmCPV 2A), and flacherie virus (BmIFV 2A) of B. mori, as described by Kim J H et al. (2011). PLoS One; 6(4):e18556 and Wang Y et al. (2015). Sci Rep; 5:16273. As a non-limiting example, the single peptide may be composed of the following components: [CAR]-[P2A cleavage site]-[IL15Rα/IL15-DD].

[0615] DD-IL15/IL15Ra fusion proteins of the present invention may be conjugated to tumor-associated antigen-recognizing antibodies or binding partners, thereby constructing bivalent-binding fusion molecules or bi-specific T-cell engagers, as described in International Patent Application Publication Nos. WO2015120187, WO2015120180, WO2016123142, WO2016123143 and WO2017000913 (the contents of each of which are incorporated herein by reference in their entirety.) The examples of tumor-associated antigen-recognizing antibodies or binding partners include a tripeptide Arg-Gly-Asp that binds to cell surface integrin receptors and thus target integrin-positive tumors, anti-TN glycopeptide antibody and anti-IL13Ra2 antibody. The fusion molecules comprising IL15/IL15Ra fusion proteins are designed to provide a second function in conjunction with CARs to improve T cell activation and persistence.

[0616] In some aspects, DD-IL15 is trans-presented to T cells or NK cells via IL15 fusion molecules that are linked to heterologous transmembrane domains without IL15Rα, as described by Imamura M et al. (2014) Blood; 124(7):1081-1088, Garg T K et al. (2012) Haematologica; 97(9): 1348-1356, Shook D R and Campana D (2011) Tissue Antigens; 78(6):409-415, Cho D and Campana D (2009) Korean J Lab Med; 29(2):89-96, Ayello J et al. (2017) Exp Hematol; 46:38-47, Qian L et al. (2011) Plasmid; 65(3):239-45, and Weinstein-Marom H et al. (2016) J Immunother; 39(2):60-70; U.S. Pat. Nos. 7,435,596; 8,026,097; 8,399,645; 9,605,049; and 9,623,082; US patent publication NOs. US20140328812 and US20160009784; and International patent publication NOs. WO2015174928 and WO2014005072; the contents of each of which are incorporated herein by reference in their entirety. In some embodiments, IL15 is fused to CD8alpha signal peptide and CD8alpha transmembrane, as described by International patent publication NO. WO2015174928, SEQ. ID NO. 1 and SEQ. ID NO. 2, the contents of which are incorporated herein by reference in their entirety. In some embodiments, DD-IL15 is fused to HLA-A2 transmembrane and cytoplasmic domains via a Gly-Ser linker (e.g., Gly4Ser(Gly3Ser)2 (SEQ ID NO. 2740); and 8 aa bridge from the HLA-A2 membrane-proximal part, as described by Weinstein-Marom H et al. (2016) J Immunother; 39(2):60-70, the contents of which are incorporated herein by reference in their entirety. The DD-IL15 fusion molecule may further comprise human MHC-I light chain β2-microglobulin leader peptide. In some embodiments, DD-IL15 is fused to H-2Kb transmembrane and cytoplasmic domains via a Gly-Ser linker (e.g., Gly4Ser(Gly3Ser)2; SEQ. ID NO. 2740) and 8 amino acid bridge from the H-2Kb membrane-proximal part, as described by Weinstein-Marom H et al. (2016). J Immunother; 39(2):60-70, the contents of which are incorporated herein by reference in their entirety. The DD-IL15 fusion molecule may further comprise human MHC-I light chain β2-microglobulin leader peptide.

[0617] Under inflammatory conditions, such as infections and autoimmune diseases, expression of the immunoproteasome is induced by interferon-gamma and tumor necrosis factor-alpha as described by Ferrington D A and Gregerson D S (2012) Prog Mol Biol Transl Sci; 109:75-112 and Kimura H et al. (2015) J Immunol Res; 2015:541984. The immunoproteasome is abundantly expressed in immune cells, such as antigen-presenting cells, and has more efficient proteolytic functions compared to the constitutive proteasome. For instance, while the constitutive proteasome degrades ubiquitinated proteins to maintain cell viability and homeostasis, the primary role of the immunoproteasome is to process antigens for presentation on MHC class I molecules to CD8+ T lymphocytes as well as to process ubiquitinated proteins. In some embodiments, DD-IL15/IL15Ra fusion proteins of the present invention may be designed to evade the induction of the immunoproteasome, such that the potential degradation of DD-IL15/IL15Ra fusion proteins in the presence of ligand is avoided and the expression level of IL15/IL15Ra fusion proteins is maintained. Conversely, in some embodiments, DD-IL15/IL15Ra fusion proteins of the present invention may be designed to induce the immunoproteasome in antigen-presenting cells, such that the antigen presentation on MHC class I molecules is bolstered and consequently the proliferation and activation of CD8+ T cells is augmented.

[0618] Regulated IL15/IL15Ra may be used to promote expansion, survival and potency of CD8T_{EM} cell populations without impacting regulatory T cells, NK cells and TIL cells. In one embodiment, DD-IL15/IL15Ra may be utilized to enhance CD19 directed T cell therapies in B cell leukemia and lymphomas. In one aspect, IL15/IL15Ra may be used as payload of the invention to reduce the need for pre-conditioning regimens in current CAR-T treatment paradigms.

[0619] The effector modules containing DD-IL15, DD-IL15/IL15Ra and/or DD-IL15/IL15Ra sushi domain may be designed to be secreted (using e.g. IL2 signal sequence) or membrane bound (using e.g. IgE or CD8a signal sequence).

[0620] In some aspects, the DD-IL115/IL15Ra comprises the amino acid sequences provided in Table 28, 29, and 30. The amino acid sequences in Tables 28, 29 and 30 may comprise a stop codon which is denoted in the table with a “*” at the end of the amino acid sequence.

TABLE 28
DD-IL15/IL15Ra construct sequences

| | | Amino | Nucleic |
|---|---|---|---|
| Description/ | | Acid | Acid |
| Construct ID | Amino Acid Sequence | SEQ ID NO | SEQ ID NO |
| IgE leader | MDWTWILFLVAAATRVHS | 2794 | 5386-5388 |
| IL15RA Leader | MAPRRARGCRTLGLPALLLLLLLRPPATRG | 2815 | 5452 |
| Linker (SG3- | SGGGSGGGGSGGGGSGGGGSGGGSLQ | 2758 | 5453-5459 |
| (SG4)3-SG3-SLQ) | | | |
| Linker (SG3S) | SGGGS | 2816 | 5460-5462 |
| Linker | SGGGSGGGGSGGGGSGGGGSGGGGSGGGGSGGGS | 2817 | 5463 |
| (SG3(SG4)5SG3S) | | | |
| Linker | SGGGSGGGGSGGGGSGGGGS | 2818 | 5464 |
| Linker | GS | — | GGTTCC |
| Linker | SG | — | AGCGGC |
| Linker | GSG | — | GGATCCGGA |
| | | | or |
| | | | GGATCCGGT |
| Spacer | — | — | 5465-5467, |
| | | | and |
| | | | TCGCGAATG |
| | | | or TCGCA |
| IL15 | NWVNVISDLKKIEDLIQSMHIDATLYTESDVHPSCKVT | 2751 | 5401-5405 |
| | AMKCFLLELQVISLESGDASIHDTVENLIILANNSLSSN | | |
| | GNVTESGCKECEELEEKNIKEFLQSFVHIVQMFINTS* | | |
| IL15Ra | ITCPPPMSVEHADIWVKSYSLYSRERYICNSGFKRKAG | 2752 | 5468 |
| | TSSLTECVLNKATNVAHWTTPSLKCIRDPALVHQRPA | | |
| | PPSTVTTAGVTPQPESLSPSGKEPAASSPSSNNTAATT | | |
| | AAIVPGSQLMPSKSPSTGTTEISSHESSHGTPSQTTAKN | | |
| | WELTASASHQPPGVYPQGHSDTTVAISTSTVLLCGLS | | |
| | AVSLLACYLKSRQTPPLASVEMEAMEALPVTWGTSS | | |
| | RDEDLENCSHHL* | | |
| IL15Ra (31-205 | ITCPPPMSVEHADIWVKSYSLYSRERYICNSGFKRKAG | 2822 | 5469 |
| of Uniprot ID: | TSSLTECVLNKATNVAHWTTPSLKCIRDPALVHQRPA | | |
| Q13261.1) | PPSTVTTAGVTPQPESLSPSGKEPAASSPSSNNTAATTA | | |
| | AIVPGSQLMPSKSPSTGTTEISSHESSHGTPSQTTAKN | | |
| | WELTASASHQPPGVYPQGHSDTT | | |
| mCherry | MSKGEEDNMAIIKEFMRFKVHMEGSVNGHEFEIEGEG | 2823 | 5470 |
| | EGRPYEGTQTAKLKVTKGGPLPFAWDILSPQFMYGSK | | |
| | AYVKHPADIPDYLKLSFPEGFKWERVMNFEDGGVVT | | |
| | VTQDSSLQDGEFIYKVKLRGTNFPSDGPVMQKKTMG | | |
| | WEASSERMYPEDGALKGEIKQRLKLKDGGHYDAEVK | | |
| | TTYKAKKPVQLPGAYNVNIKLDITSHNEDYTIVEQYE | | |
| | RAEGRHSTGGMDELYK* | | |
| mCherry (M1L) | LSKGEEDNMAIIKEFMRFKVHMEGSVNGHEFEIEGEG | 2753 | 5400 |
| | EGRPYEGTQTAKLKVTKGGPLPFAWDILSPQFMYGSK | | |
| | AYVKHPADIPDYLKLSFPEGFKWERVMNFEDGGVVT | | |
| | VTQDSSLQDGEFIYKVKLRGTNFPSDGPVMQKKTMG | | |
| | WEASSERMYPEDGALKGEIKQRLKLKDGGHYDAEVK | | |
| | TTYKAKKPVQLPGAYNVNIKLDITSHNEDYTIVEQYE | | |
| | RAEGRHSTGGMDELYK | | |
| HA Tag | YPYDVPDYA | 3080 | 5396-5398 |
| Flag | DYKDDDDK | 2824 | — |
| BamHI | GS | — | GGATCC |
| P2A Cleavable | GATNFSLLKQAGDVEENPGP | 3081 | 5399 |
| Peptide | | | |
| ecDHFR (Amino | ISLIAALAVDYVIGMENAMPWNLPADLAWFKRNTLN | 1174 | 5168-5173 |
| acid 2-159 of WT | KPVIMGRHTWESIGRPLPGRKNIILSSQPGTDDRVTWV | | |
| R12Y, Y100I) | KSVDEAIAACGDVPEIMVIGGGRVIEQFLPKAQKLYLT | | |
| | HIDAEVEGDTHFPDYEPDDWESVFSEFHDADAQNSHS | | |
| | YCFEILERR* | | |
| ecDHFR (Amino | ISLIAALAVDHVIGMENAMPWNLPADLAWFKRNTLN | 1175 | 5174-5176 |
| acid 2-159 of WT | KPVIMGRHTWESIGRPLPGRKNIILSSQPGTDDRVTWV | | |
| R12H, E129K) | KSVDEAIAACGDVPEIMVIGGGRVYEQFLPKAQKLYL | | |
| | THIDAEVEGDTHFPDYKPDDWESVFSEFHDADAQNS | | |
| | HSYCFEILERR* | | |
| FKBP (E31G, | GVQVETISPGDGRTFPKRGQTCVVHYTGMLGDGKKV | 1177 | 5351-5357 |
| F36V, R71G, | DSSRDRNKPFKFMLGKQEVIRGWEEGVAQMSVGQG | | |
| K105E) | AKLTISPDYAYGATGHPGIIPPHATLVFDVELLELE* | | |
| hDHFR (Amino | VGSLNCIVAVSQNMGIGKNGDLPWPPLRNEFRYFQR | 1252 | 5474-5477 |
| acid 2-187 of WT; | MTTTSSVEGKQNLVIMGKKTWFSIPEKNRPLKGRINL | | |
| Y122I, A125F) | VLSRELKEPPQGAHFLSRSLDDALKLTEQPELANKVD | | |
| | MVWIVGGSSVIKEFMNHPGHLKLFVTRIMQDFESDTF | | |
| | FPEIDLEKYKLLPEYPGVLSDVQEEKGIKYKFEVYEKN | | |
| | D* | | |
| hDHFR (Amino | VGSLNCIVAVSQNMGIGKNGDLPWPPLRNEFRYFFRM | 1253 | 5478-5481 |
| acid 2-187 of WT; | TTTSSVEGKQNLVIMGKKTWFSIPEKFRPLKGRINLVL | | |
| Q36F, N65F, | SRELKEPPQGAHFLSRSLDDALKLTEQPELANKVDMV | | |
| Y122I) | WIVGGSSVIKEAMNHPGHLKLFVTRIMQDFESDTFFPE | | |
| | IDLEKYKLLPEYPGVLSDVQEEKGIKYKFEVYEKND | | |
| hDHFR (Amino | VGSLNCIVAVSQNMGIGKNGDLPWPPLRNEFRYFQR | 1251 | 5482 |
| acid 2-187 of WT; | MTTTSSVEGKQNLVIMGKKTWFSIPEKNRPLKGRINL | | |
| K185E) | VLSRELKEPPQGAHFLSRSLDDALKLTEQPELANKVD | | |
| | MVWIVGGSSVYKEAMNHPGHLKLFVTRIMQDFESDT | | |
| | FFPEIDLEKYKLLPEYPGVLSDVQEEKGIKYKFEVYEE | | |
| | ND* | | |
| hDHFR (Amino | VGSLNCIVAVSQNMGIGKNGDLPWPPLRNEFRYFQR | 1250 | 5483-5484 |
| acid 2-187 of WT; | MTTTSSVEGKQNLVIMGKKTWFSIPEKNRPLKGRINL | | |
| E162G, I176F) | VLSRELKEPPQGAHFLSRSLDDALKLTEQPELANKVD | | |
| | MVWIVGGSSVYKEAMNHPGHLKLFVTRIMQDFESDT | | |
| | FFPEIDLEKYKLLPGYPGVLSDVQEEKGFKYKFEVYE | | |
| | KND* | | |
| hDHFR (Amino | VGSLNCIVAVSQNMGIGKNGDLPWPPLRNEFRYFQR | 1254 | 5485 |
| acid 2-187 of WT; | MTTTSSVEGKQNLVIMGKKTWFSIPEKNRPLKGRINL | | |
| N127Y) | VLSRELKEPPQGAHFLSRSLDDALKLTEQPELANKVD | | |
| | MVWIVGGSSVYKEAMYHPGHLKLFVTRIMQDFESDT | | |
| | FFPEIDLEKYKLLPEYPGVLSDVQEEKGIKYKFEVYEK | | |
| | ND | | |
| hDHFR (Amino | VGSLNCIVAVSQNMGVGKNGDLPWPPLRNEFRYFQR | 1256 | 5359 |
| acid 2-187 of WT; | MTTTSSVEGKQNLVIMGKKTWFSIPEKNRPLKGRINL | | |
| I17V) | VLSRELKEPPQGAHFLSRSLDDALKLTEQPELANKVD | | |
| | MVWIVGGSSVYKEAMNHPGHLKLFVTRIMQDFESDT | | |
| | FFPEIDLEKYKLLPEYPGVLSDVQEEKGIKYKFEVYEK | | |
| | ND | | |
| hDHFR (Amino | VGSLNCIVAVSQNMGVGKNGDLPWPPLRNEFRYFQR | 1244 | 5486 |
| acid 2-187 of WT; | MTTTSSVEGKQNLVIMGKKTWFSIPEKNRPLKGRINL | | |
| I17V, Y122I) | VLSRELKEPPQGAHFLSRSLDDALKLTEQPELANKVD | | |
| | MVWIVGGSSVIKEAMNHPGHLKLFVTRIMQDFESDTF | | |
| | FPEIDLEKYKLLPEYPGVLSDVQEEKGIKYKFEVYEKN | | |
| | D | | |
| hDHFR (Amino | VGSLNCIVAVSQNMGIGKNGDLPWPPLRNEFRYFQR | 1255 | 5487 |
| acid 2-187 of WT; | MTTTSSVEGKQNLVIMGKKTWFSIPEKNRPLKGRINL | | |
| H131R, E144G) | VLSRELKEPPQGAHFLSRSLDDALKLTEQPELANKVD | | |
| | MVWIVGGSSVYKEAMNHPGRLKLFVTRIMQDFGSDT | | |
| | FFPEIDLEKYKLLPEYPGVLSDVQEEKGIKYKFEVYEK | | |
| | ND | | |

TABLE 29
DD-IL15/IL15Ra constructs

| | | | Amino | Nucleic |
|---|---|---|---|---|
| | | | Acid | Acid |
| | Pro- | | SEQ | SEQ |
| Description | moter | Amino acid sequences | ID NO | ID NO |
| OT-IL15-006 | EF1a | MDWTWILFLVAAATRVHSNWVNVISDL | 2825 | 5488 |
| (IgE signal | | KKIEDLIQSMHIDATLYTESDVHPSCKVT | | |
| sequence; IL15; | | AMKCFLLELQVISLESGDASIHDTVENLII | | |
| linker1 (SG3- | | LANNSLSSNGNVTESGCKECEELEEKNIK | | |
| (SG4)5-SG3 | | EFLQSFVHIVQMFINTSSGGGSGGGGSGG | | |
| (SEQ ID NO: | | GGSGGGGSGGGSLQITCPPPMSVEHADI | | |
| 3085)); IL15Ra; | | WVKSYSLYSRERYICNSGFKRKAGTSSL | | |
| 1inker2 (GGSGG | | TECVLNKATNVAHWTTPSLKCIRDPALV | | |
| (SEQ ID NO: | | HQRPAPPSTVTTAGVTPQPESLSPSGKEP | | |
| 2729)); ecDHFR | | AASSPSSNNTAATTAAIVPGSQLMPSKSP | | |
| (R12H, E129K)) | | STGTTEISSHESSHGTPSQTTAKNWELTA | | |
| | | SASHQPPGVYPQGHSDTTVAISTSTVLLC | | |
| | | GLSAVSLLACYLKSRQTPPLASVEMEAM | | |
| | | EALPVTWGTSSRDEDLENCSHHLSGISLI | | |
| | | AALAVDHVIGMENAMPWNLPADLAWF | | |
| | | KRNTLNKPVIMGRHTWESIGRPLPGRKN | | |
| | | IILSSQPGTDDRVTWVKSVDEAIAACGD | | |
| | | VPEIMVIGGGRVYEQFLPKAQKLYLTHI | | |
| | | DAEVEGDTHFPDYKPDDWESVFSEFHD | | |
| | | ADAQNSHSYCFEILERR* | | |
| OT-IL15-007 | EF1a | MDWTWILFLVAAATRVHSNWVNVISDL | 2826 | 5489 |
| (IgE signal | | KKIEDLIQSMHIDATLYTESDVHPSCKVT | | |
| sequence; IL15; | | AMKCFLLELQVISLESGDASIHDTVENLII | | |
| linker1 (SG3- | | LANNSLSSNGNVTESGCKECEELEEKNIK | | |
| (SG4)5-SG3 | | EFLQSFVHIVQMFINTSSGGGSGGGGSGG | | |
| (SEQ ID NO: | | GGSGGGGSGGGSLQITCPPPMSVEHADI | | |
| 3085)); IL15Ra; | | WVKSYSLYSRERYICNSGFKRKAGTSSL | | |
| linker2 (GGSGG | | TECVLNKATNVAHWTTPSLKCIRDPALV | | |
| (SEQ ID NO: | | HQRPAPPSTVTTAGVTPQPESLSPSGKEP | | |
| 2729)); FKBP | | AASSPSSNNTAATTAAIVPGSQLMPSKSP | | |
| (E31G,F36V, | | STGTTEISSHESSHGTPSQTTAKNWELTA | | |
| R71G, K105E)) | | SASHQPPGVYPQGHSDTTVAISTSTVLLC | | |
| | | GLSAVSLLACYLKSRQTPPLASVEMEAM | | |
| | | EALPVTWGTSSRDEDLENCSHHLSGGVQ | | |
| | | VETISPGDGRTFPKRGQTCVVHYTGMLG | | |
| | | DGKKVDSSRDRNKPFKFMLGKQEVIRG | | |
| | | WEEGVAQMSVGQGAKLTISPDYAYGAT | | |
| | | GHPGIIPPHATLVFDVELLELE* | | |
| OT-IL15-008 | EF1a | MDWTWILFLVAAATRVHSNWVNVISDL | 2827 | 5490 |
| (IgE signal | | KKIEDLIQSMHIDATLYTESDVHPSCKVT | | |
| sequence-IL15- | | AMKCFLLELQVISLESGDASIHDTVENLII | | |
| linker (SG3- | | LANNSLSSNGNVTESGCKECEELEEKNIK | | |
| (SG4)3-SG3- | | EFLQSFVHIVQMFINTSSGGGSGGGGSGG | | |
| SLQ (SEQ ID | | GGSGGGGSGGGSLQITCPPPMSVEHADI | | |
| NO: 2730))- | | WVKSYSLYSRERYICNSGFKRKAGTSSL | | |
| IL15Ra-stop) | | TECVLNKATNVAHWTTPSLKCIRDPALV | | |
| | | HQRPAPPSTVTTAGVTPQPESLSPSGKEP | | |
| | | AASSPSSNNTAATTAAIVPGSQLMPSKSP | | |
| | | STGTTEISSHESSHGTPSQTTAKNWELTA | | |
| | | SASHQPPGVYPQGHSDTTVAISTSTVLLC | | |
| | | GLSAVSLLACYLKSRQTPPLASVEMEAM | | |
| | | EALPVTWGTSSRDEDLENCSHHL* | | |
| OT-IL15-009 | EF1a | MDWTWILFLVAAATRVHSNWVNVISDL | 2828 | 5491 |
| (IgE signal | | KKIEDLIQSMHIDATLYTESDVHPSCKVT | | |
| sequence-IL15- | | AMKCFLLELQVISLESGDASIHDTVENLII | | |
| linker (SG3- | | LANNSLSSNGNVTESGCKECEELEEKNIK | | |
| (SG4)3-SG3- | | EFLQSFVHIVQMFINTSSGGGSGGGGSGG | | |
| SLQ (SEQ ID | | GGSGGGGSGGGSLQITCPPPMSVEHADI | | |
| NO: 2730))- | | WVKSYSLYSRERYICNSGFKRKAGTSSL | | |
| IL15Ra-linker | | TECVLNKATNVAHWTTPSLKCIRDPALV | | |
| (SG)-ecDHFR | | HQRPAPPSTVTTAGVTPQPESLSPSGKEP | | |
| (Amino acid 2- | | AASSPSSNNTAATTAAIVPGSQLMPSKSP | | |
| 159 of WT; | | STGTTEISSHESSHGTPSQTTAKNWELTA | | |
| R12Y, Y100I)- | | SASHQPPGVYPQGHSDTTVAISTSTVLLC | | |
| stop) | | GLSAVSLLACYLKSRQTPPLASVEMEAM | | |
| | | EALPVTWGTSSRDEDLENCSHHLSGISLI | | |
| | | AALAVDYVIGMENAMPWNLPADLAWF | | |
| | | KRNTLNKPVIMGRHTWESIGRPLPGRKN | | |
| | | IILSSQPGTDDRVTWVKSVDEAIAACGD | | |
| | | VPEIMVIGGGRVIEQFLPKAQKLYLTHID | | |
| | | AEVEGDTHFPDYEPDDWESVFSEFHDAD | | |
| | | AQNSHSYCFEILERR* | | |
| OT-IL15-010 | EF1a | MDWTWILFLVAAATRVHSNWVNVISDL | 2829 | 5492 |
| (IgE signal | | KKIEDLIQSMHIDATLYTESDVHPSCKVT | | |
| sequence-IL15- | | AMKCFLLELQVISLESGDASIHDTVENLII | | |
| linker (SG3- | | LANNSLSSNGNVTESGCKECEELEEKNIK | | |
| (SG4)3-SG3- | | EFLQSFVHIVQMFINTSSGGGSGGGGSGG | | |
| SLQ (SEQ ID | | GGSGGGGSGGGSLQITCPPPMSVEHADI | | |
| NO: 2730))- | | WVKSYSLYSRERYICNSGFKRKAGTSSL | | |
| IL15Ra-linker | | TECVLNKATNVAHWTTPSLKCIRDPAL | | |
| (SG)-hDHFR | | HQRPAPPSTVTTAGVTPQPESLSPSGKEP | | |
| (Y122I, A125F)- | | AASSPSSNNTAATTAAIVPGSQLMPSKSP | | |
| stop) | | STGTTEISSHESSHGTPSQTTAKNWELTA | | |
| | | SASHQPPGVYPQGHSDTTVAISTSTVLLC | | |
| | | GLSAVSLLACYLKSRQTPPLASVEMEAM | | |
| | | EALPVTWGTSSRDEDLENCSHHLSGVGS | | |
| | | LNCIVAVSQNMGIGKNGDLPWPPLRNEF | | |
| | | RYFQRMTTTSSVEGKQNLVIMGKKTWF | | |
| | | SIPEKNRPLKGRINLVLSRELKEPPQGAH | | |
| | | FLSRSLDDALKLTEQPELANKVDMVWIV | | |
| | | GGSSVIKEFMNHPGHLKLFVTRIMQDFE | | |
| | | SDTFFPEIDLEKYKLLPEYPGVLSDVQEE | | |
| | | KGIKYKFEVYEKND* | | |
| OT-IL15-011 | EF1a | MDWTWILFLVAAATRVHSNWVNVISDL | 2830 | 5493 |
| (IgE signal | | KKIEDLIQSMHIDATLYTESDVHPSCKVT | | |
| sequence-IL15- | | AMKCFLLELQVISLESGDASIHDTVENLII | | |
| linker (SG3- | | LANNSLSSNGNVTESGCKECEELEEKNIK | | |
| (SG4)3-SG3- | | EFLQSFVHIVQMFINTSSGGGSGGGGSGG | | |
| SLQ (SEQ ID | | GGSGGGGSGGGSLQITCPPPMSVEHADI | | |
| NO: 2730))- | | WVKSYSLYSRERYICNSGFKRKAGTSSL | | |
| IL15Ra; linker | | TECVLNKATNVAHWTTPSLKCIRDPALV | | |
| (SG)-hDHFR | | HQRPAPPSTVTTAGVTPQPESLSPSGKEP | | |
| (Amino acid 2- | | AASSPSSNNTAATTAAIVPGSQLMPSKSP | | |
| 187 of WT; | | STGTTEISSHESSHGTPSQTTAKNWELTA | | |
| Q36F, N65F, | | SASHQPPGVYPQGHSDTTVAISTSTVLLC | | |
| Y122I)-stop) | | GLSAVSLLACYLKSRQTPPLASVEMEAM | | |
| | | EALPVTWGTSSRDEDLENCSHHLSGVGS | | |
| | | LNCIVAVSQNMGIGKNGDLPWPPLRNEF | | |
| | | RYFFRMTTTSSVEGKQNLVIMGKKTWFS | | |
| | | IPEKFRPLKGRINLVLSRELKEPPQGAHFL | | |
| | | SRSLDDALKLTEQPELANKVDMVWIVG | | |
| | | GSSVIKEAMNHPGHLKLFVTRIMQDFES | | |
| | | DTFFPEIDLEKYKLLPEYPGVLSDVQEEK | | |
| | | GIKYKFEVYEKND* | | |
| OT-IL15-017 | EF1a | MDWTWILFLVAAATRVHSNWVNVISDL | 2831 | 5494 |
| (IgE signal | | KKIEDLIQSMHIDATLYTESDVHPSCKVT | | |
| sequence-IL15- | | AMKCFLLELQVISLESGDASIHDTVENLII | | |
| linker (SG3- | | LANNSLSSNGNVTESGCKECEELEEKNIK | | |
| (SG4)3-SG3- | | EFLQSFVHIVQMFINTSSGGGSGGGGSGG | | |
| SLQ (SEQ ID | | GGSGGGGSGGGSLQITCPPPMSVEHADI | | |
| NO: 2730))- | | WVKSYSLYSRERYICNSGFKRKAGTSSL | | |
| IL15Ra-linker | | TECVLNKATNVAHWTTPSLKCIRDPALV | | |
| (SG)-hDHFR | | HQRPAPPSTVTTAGVTPQPESLSPSGKEP | | |
| (Amino acid 2- | | AASSPSSNNTAATTAAIVPGSQLMPSKSP | | |
| 187 of WT; | | STGTTEISSHESSHGTPSQTTAKNWELTA | | |
| K185E)-stop) | | SASHQPPGVYPQGHSDTTVAISTSTVLLC | | |
| | | GLSAVSLLACYLKSRQTPPLASVEMEAM | | |
| | | EALPVTWGTSSRDEDLENCSHHLSGVGS | | |
| | | LNCIVAVSQNMGIGKNGDLPWPPLRNEF | | |
| | | RYFQRMTTTSSVEGKQNLVIMGKKTWF | | |
| | | SIPEKNRPLKGRINLVLSRELKEPPQGAH | | |
| | | FLSRSLDDALKLTEQPELANKVDMVWIV | | |
| | | GGSSVYKEAMNHPGHLKLFVTRIMQDF | | |
| | | ESDTFFPEIDLEKYKLLPEYPGVLSDVQE | | |
| | | EKGIKYKFEVYEEND* | | |
| OT-IL15-018 | EF1a | MDWTWILFLVAAATRVHSNWVNVISDL | 2832 | 5495 |
| (IgE signal | | KKIEDLIQSMHIDATLYTESDVHPSCKVT | | |
| sequence-IL15- | | AMKCFLLELQVISLESGDASIHDTVENLII | | |
| linker (SG3- | | LANNSLSSNGNVTESGCKECEELEEKNIK | | |
| (SG4)3-SG3- | | EFLQSFVHIVQMFINTSSGGGSGGGGSGG | | |
| SLQ (SEQ ID | | GGSGGGGSGGGSLQITCPPPMSVEHADI | | |
| NO: 2730))- | | WVKSYSLYSRERYICNSGFKRKAGTSSL | | |
| IL15Ra-linker | | TECVLNKATNVAHWTTPSLKCIRDPALV | | |
| (SG)-hDHFR | | HQRPAPPSTVTTAGVTPQPESLSPSGKEP | | |
| (Amino acid 2- | | AASSPSSNNTAATTAAIVPGSQLMPSKSP | | |
| 187 of WT; | | STGTTEISSHESSHGTPSQTTAKNWELTA | | |
| E162G, I176F)- | | SASHQPPGVYPQGHSDTTVAISTSTVLLC | | |
| stop) | | GLSAVSLLACYLKSRQTPPLASVEMEAM | | |
| | | EALPVTWGTSSRDEDLENCSHHLSGVGS | | |
| | | LNCIVAVSQNMGIGKNGDLPWPPLRNEF | | |
| | | RYFQRMTTTSSVEGKQNLVIMGKKTWF | | |
| | | SIPEKNRPLKGRINLVLSRELKEPPQGAH | | |
| | | FLSRSLDDALKLTEQPELANKVDMVWIV | | |
| | | GGSSVYKEAMNHPGHLKLFVTRIMQDF | | |
| | | ESDTFFPEIDLEKYKLLPGYPGVLSDVQE | | |
| | | EKGFKYKFEVYEKND* | | |
| OT-IL15-038 | EF1a | MDWTWILFLVAAATRVHSNWVNVISDL | 2833 | 5496 |
| (IgE leader- | | KKIEDLIQSMHIDATLYTESDVHPSCKVT | | |
| IL15-Linker | | AMKCFLLELQVISLESGDASIHDTVENLII | | |
| (SG3-(SG4)3- | | LANNSLSSNGNVTESGCKECEELEEKNIK | | |
| SG3-SLQ (SEQ | | EFLQSFVHIVQMFINTSSGGGSGGGGSGG | | |
| ID NO: 2730))- | | GGSGGGGSGGGSLQITCPPPMSVEHADI | | |
| IL15Ra-Linker | | WVKSYSLYSRERYICNSGFKRKAGTSSL | | |
| (SG-hDHFR | | TECVLNKATNVAHWTTPSLKCIRDPALV | | |
| (Amino acid 2- | | HQRPAPPSTVTTAGVTPQPESLSPSGKEP | | |
| 187 of WT; | | AASSPSSNNTAATTAAIVPGSQLMPSKSP | | |
| N127Y)-stop) | | STGTTEISSHESSHGTPSQTTAKNWELTA | | |
| | | SASHQPPGVYPQGHSDTTVAISTSTVLLC | | |
| | | GLSAVSLLACYLKSRQTPPLASVEMEAM | | |
| | | EALPVTWGTSSRDEDLENCSHHLSGVGS | | |
| | | LNCIVAVSQNMGIGKNGDLPWPPLRNEF | | |
| | | RYFQRMTTTSSVEGKQNLVIMGKKTWF | | |
| | | SIPEKNRPLKGRINLVLSRELKEPPQGAH | | |
| | | FLSRSLDDALKLTEQPELANKVDMVWIV | | |
| | | GGSSVYKEAMYHPGHLKLFVTRIMQDF | | |
| | | ESDTFFPEIDLEKYKLLPEYPGVLSDVQE | | |
| | | EKGIKYKFEVYEKND* | | |
| OT-IL15-051 | EF1a | MDWTWILFLVAAATRVHSNWVNVISDL | 2834 | 5497 |
| (IgE leader- | | KKIEDLIQSMHIDATLYTESDVHPSCKVT | | |
| IL15-Linker | | AMKCFLLELQVISLESGDASIHDTVENLII | | |
| (SG3-(SG4)3- | | LANNSLSSNGNVTESGCKECEELEEKNIK | | |
| SG3-SLQ (SEQ | | EFLQSFVHIVQMFINTSSGGGSGGGGSGG | | |
| ID NO: 2730))- | | GGSGGGGSGGGSLQYPYDVPDYAITCPP | | |
| HA Tag- | | PMSVEHADIWVKSYSLYSRERYICNSGF | | |
| IL15Ra-stop) | | KRKAGTSSLTECVLNKATNVAHWTTPSL | | |
| | | KCIRDPALVHQRPAPPSTVTTAGVTPQPE | | |
| | | SLSPSGKEPAASSPSSNNTAATTAAIVPG | | |
| | | SQLMPSKSPSTGTTEISSHESSHGTPSQTT | | |
| | | AKNWELTASASHQPPGVYPQGHSDTTV | | |
| | | AISTSTVLLCGLSAVSLLACYLKSRQTPP | | |
| | | LASVEMEAMEALPVTWGTSSRDEDLEN | | |
| | | CSHHL* | | |
| OT-IL15-053 | EF1a | MDWTWILFLVAAATRVHSNWVNVISDL | 2835 | 5498 |
| (IgE leader- | | KKIEDLIQSMHIDATLYTESDVHPSCKVT | | |
| IL15-Linker | | AMKCFLLELQVISLESGDASIHDTVENLII | | |
| (SG3(SG4)5SG3S | | LANNSLSSNGNVTESGCKECEELEEKNIK | | |
| (SEQ ID NO: | | EFLQSFVHIVQMFINTSSGGGSGGGGSGG | | |
| 3087))-IL15Ra- | | GGSGGGGSGGGGSGGGGSGGGSITCPPP | | |
| Stop) | | MSVEHADIWVKSYSLYSRERYICNSGFK | | |
| | | RKAGTSSLTECVLNKATNVAHWTTPSLK | | |
| | | CIRDPALVHQRPAPPSTVTTAGVTPQPES | | |
| | | LSPSGKEPAASSPSSNNTAATTAAIVPGS | | |
| | | QLMPSKSPSTGTTEISSHESSHGTPSQTTA | | |
| | | KNWELTASASHQPPGVYPQGHSDTTVAI | | |
| | | STSTVLLCGLSAVSLLACYLKSRQTPPLA | | |
| | | SVEMEAMEALPVTWGTSSRDEDLENCS | | |
| | | HHL* | | |
| OT-IL15-054 | EF1a | MDWTWILFLVAAATRVHSNWVNVISDL | 2836 | 5499 |
| (IgE leader- | | KKIEDLIQSMHIDATLYTESDVHPSCKVT | | |
| IL15-Linker | | AMKCFLLELQVISLESGDASIHDTVENLII | | |
| (SG3(SG4)3S | | LANNSLSSNGNVTESGCKECEELEEKNIK | | |
| (SEQ ID NO: | | EFLQSFVHIVQMFINTSSGGGSGGGGSGG | | |
| 3088))-HA Tag- | | GGSGGGGSYPYDVPDYASGGGSITCPPP | | |
| Linker (SG3S | | MSVEHADIWVKSYSLYSRERYICNSGFK | | |
| (SEQ ID NO: | | RKAGTSSLTECVLNKATNVAHWTTPSLK | | |
| 3089))-IL15Ra- | | CIRDPALVHQRPAPPSTVTTAGVTPQPES | | |
| Stop) | | LSPSGKEPAASSPSSNNTAATTAAIVPGS | | |
| | | QLMPSKSPSTGTTEISSHESSHGTPSQTTA | | |
| | | KNWELTASASHQPPGVYPQGHSDTTVAI | | |
| | | STSTVLLCGLSAVSLLACYLKSRQTPPLA | | |
| | | SVEMEAMEALPVTWGTSSRDEDLENCS | | |
| | | HHL* | | |
| OT-IL15-055 | EF1a | MDWTWILFLVAAATRVHSNWVNVISDL | 2837 | 5500 |
| (IgE leader- | | KKIEDLIQSMHIDATLYTESDVHPSCKVT | | |
| IL15-Linker | | AMKCFLLELQVISLESGDASIHDTVENLII | | |
| (SG)-IL15Ra- | | LANNSLSSNGNVTESGCKECEELEEKNIK | | |
| Stop) | | EFLQSFVHIVQMFINTSSGITCPPPMSVEH | | |
| | | ADIWVKSYSLYSRERYICNSGFKRKAGT | | |
| | | SSLTECVLNKATNVAHWTTPSLKCIRDP | | |
| | | ALVHQRPAPPSTVTTAGVTPQPESLSPSG | | |
| | | KEPAASSPSSNNTAATTAAIVPGSQLMPS | | |
| | | KSPSTGTTEISSHESSHGTPSQTTAKNWE | | |
| | | LTASASHQPPGVYPQGHSDTTVAISTSTV | | |
| | | LLCGLSAVSLLACYLKSRQTPPLASVEM | | |
| | | EAMEALPVTWGTSSRDEDLENCSHHL* | | |
| OT-IL15-060 | EF1a | MAPRRARGCRTLGLPALLLLLLLRPPAT | 2838 | 5501 |
| (IL15Ra signal | | RGNWVNVISDLKKIEDLIQSMHIDATLYT | | |
| peptide-IL15- | | ESDVHPSCKVTAMKCFLLELQVISLESG | | |
| Linker(SG3- | | DASIHDTVENLIILANNSLSSNGNVTESG | | |
| (SG4)3-SG3- | | CKECEELEEKNIKEFLQSFVHIVQMFINT | | |
| SLQ (SEQ ID | | SSGGGSGGGGSGGGGSGGGGSGGGSLQI | | |
| NO: 2730))- | | TCPPPMSVEHADIWVKSYSLYSRERYIC | | |
| IL15Ra-stop) | | NSGFKRKAGTSSLTECVLNKATNVAHW | | |
| | | TTPSLKCIRDPALVHQRPAPPSTVTTAGV | | |
| | | TPQPESLSPSGKEPAASSPSSNNTAATTA | | |
| | | AIVPGSQLMPSKSPSTGTTEISSHESSHGT | | |
| | | PSQTTAKNWELTASASHQPPGVYPQGHS | | |
| | | DTTVAISTSTVLLCGLSAVSLLACYLKSR | | |
| | | QTPPLASVEMEAMEALPVTWGTSSRDE | | |
| | | DLENCSHHL* | | |
| OT-IL15-063 | EF1a | MDWTWILFLVAAATRVHSNWVNVISDL | 2839 | 5502 |
| (IgE leader- | | KKIEDLIQSMHIDATLYTESDVHPSCKVT | | |
| IL15-Linker | | AMKCFLLELQVISLESGDASIHDTVENLII | | |
| (SG3-(SG4)3- | | LANNSLSSNGNVTESGCKECEELEEKNIK | | |
| SG3-SLQ (SEQ | | EFLQSFVHIVQMFINTSSGGGSGGGGSGG | | |
| ID NO: 2730))- | | GGSGGGGSGGGSLQITCPPPMSVEHADI | | |
| IL15Ra- | | WVKSYSLYSRERYICNSGFKRKAGTSSL | | |
| BamHI (GS)- | | TECVLNKATNVAHWTTPSLKCIRDPALV | | |
| stop) | | HQRPAPPSTVTTAGVTPQPESLSPSGKEP | | |
| | | AASSPSSNNTAATTAAIVPGSQLMPSKSP | | |
| | | STGTTEISSHESSHGTPSQTTAKNWELTA | | |
| | | SASHQPPGVYPQGHSDTTVAISTSTVLLC | | |
| | | GLSAVSLLACYLKSRQTPPLASVEMEAM | | |
| | | EALPVTWGTSSRDEDLENCSHHLGS* | | |
| OT-IL15-064 | EF1a | MDWTWILFLVAAATRVHSNWVNVISDL | 2827 | 5490 |
| and OT-IL15- | | KKIEDLIQSMHIDATLYTESDVHPSCKVT | | |
| 071 (IgE leader- | | AMKCFLLELQVISLESGDASIHDTVENLII | | |
| IL15-Linker | | LANNSLSSNGNVTESGCKECEELEEKNIK | | |
| (SG3-(SG4)3- | | EFLQSFVHIVQMFINTSSGGGSGGGGSGG | | |
| SG3-SLQ (SEQ | | GGSGGGGSGGGSLQITCPPPMSVEHADI | | |
| ID NO: 2730))- | | WVKSYSLYSRERYICNSGFKRKAGTSSL | | |
| IL15Ra-stop) | | TECVLNKATNVAHWTTPSLKCIRDPALV | | |
| | | HQRPAPPSTVTTAGVTPQPESLSPSGKEP | | |
| | | AASSPSSNNTAATTAAIVPGSQLMPSKSP | | |
| | | STGTTEISSHESSHGTPSQTTAKNWELTA | | |
| | | SASHQPPGVYPQGHSDTTVAISTSTVLLC | | |
| | | GLSAVSLLACYLKSRQTPPLASVEMEAM | | |
| | | EALPVTWGTSSRDEDLENCSHHL* | | |
| OT-IL15-066 | EF1a | MDWTWILFLVAAATRVHSNWVNVISDL | 2828 | 5491 |
| (IgE leader- | | KKIEDLIQSMHIDATLYTESDVHPSCKVT | | |
| IL15-Linker | | AMKCFLLELQVISLESGDASIHDTVENLII | | |
| (SG3-(SG4)3- | | LANNSLSSNGNVTESGCKECEELEEKNIK | | |
| SG3-SLQ (SEQ | | EFLQSFVHIVQMFINTSSGGGSGGGGSGG | | |
| ID NO: 2730))- | | GGSGGGGSGGGSLQITCPPPMSVEHADI | | |
| IL15Ra-Linker | | WVKSYSLYSRERYICNSGFKRKAGTSSL | | |
| (SG) ecDHFR | | TECVLNKATNVAHWTTPSLKCIRDPALV | | |
| (Amino acid 2- | | HQRPAPPSTVTTAGVTPQPESLSPSGKEP | | |
| 159 of WT, | | AASSPSSNNTAATTAAIVPGSQLMPSKSP | | |
| R12Y, Y100I)- | | STGTTEISSHESSHGTPSQTTAKNWELTA | | |
| stop) | | SASHQPPGVYPQGHSDTTVAISTSTVLLC | | |
| | | GLSAVSLLACYLKSRQTPPLASVEMEAM | | |
| | | EALPVTWGTSSRDEDLENCSHHLSGISLI | | |
| | | AALAVDYVIGMENAMPWNLPADLAWF | | |
| | | KRNTLNKPVIMGRHTWESIGRPLPGRKN | | |
| | | IILSSQPGTDDRVTWVKSVDEAIAACGD | | |
| | | VPEIMVIGGGRVIEQFLPKAQKLYLTHID | | |
| | | AEVEGDTHFPDYEPDDWESVFSEFHDAD | | |
| | | AQNSHSYCFEILERR* | | |
| OT-IL15-067 | EF1a | MDWTWILFLVAAATRVHSNWVNVISDL | 2840 | 5503 |
| (IgE leader- | | KKIEDLIQSMHIDATLYTESDVHPSCKVT | | |
| IL15-Linker | | AMKCFLLELQVISLESGDASIHDTVENLII | | |
| (SG3-(SG4)3- | | LANNSLSSNGNVTESGCKECEELEEKNIK | | |
| SG3-SLQ (SEQ | | EFLQSFVHIVQMFINTSSGGGSGGGGSGG | | |
| ID NO: 2730))- | | GGSGGGGSGGGSLQITCPPPMSVEHADI | | |
| IL15Ra-Linker | | WVKSYSLYSRERYICNSGFKRKAGTSSL | | |
| (SG)-ecDHFR | | TECVLNKATNVAHWTTPSLKCIRDPALV | | |
| (Amino acid 2- | | HQRPAPPSTVTTAGVTPQPESLSPSGKEP | | |
| 159 of WT, | | AASSPSSNNTAATTAAIVPGSQLMPSKSP | | |
| R12Y, Y100I)- | | STGTTEISSHESSHGTPSQTTAKNWELTA | | |
| stop) | | SASHQPPGVYPQGHSDTTVAISTSTVLLC | | |
| | | GLSAVSLLACYLKSRQTPPLASVEMEAM | | |
| | | EALPVTWGTSSRDEDLENCSHHLSGISLI | | |
| | | AALAVDYVIGMENAMPWNLPADLAWF | | |
| | | KRNTLNKPVIMGRHTWESIGRPLPGRKN | | |
| | | IILSSQPGTDDRVTWVKSVDEAIAACGD | | |
| | | VPEIMVIGGGRVIEQFLPKAQKLYLTHID | | |
| | | AEVEGDTHFPDYEPDDWESVFSEFHDAD | | |
| | | AQNSHSYCFEILERR* | | |
| OT-IL15-070 | EF1a | MAPRRARGCRTLGLPALLLLLLLRPPAT | 2841 | 5494 |
| (IL15Ra signal | | RGNWVNVISDLKKIEDLIQSMHIDATLYT | | |
| peptide-IL15- | | ESDVHPSCKVTAMKCFLLELQVISLESG | | |
| Linker (SG3- | | DASIHDTVENLIILANNSLSSNGNVTESG | | |
| (SG4)3-SG3- | | CKECEELEEKNIKEFLQSFVHIVQMFINT | | |
| SLQ (SEQ ID | | SSGGGSGGGGSGGGGSGGGGSGGGSLQI | | |
| NO: 2730))- | | TCPPPMSVEHADIWVKSYSLYSRERYIC | | |
| IL15Ra-stop) | | NSGFKRKAGTSSLTECVLNKATNVAHW | | |
| | | TTPSLKCIRDPALVHQRPAPPSTVTTAGV | | |
| | | TPQPESLSPSGKEPAASSPSSNNTAATTA | | |
| | | AIVPGSQLMPSKSPSTGTTEISSHESSHGT | | |
| | | PSQTTAKNWELTASASHQPPGVYPQGHS | | |
| | | DTTVAISTSTVLLCGLSAVSLLACYLKSR | | |
| | | QTPPLASVEMEAMEALPVTWGTSSRDE | | |
| | | DLENCSHHL* | | |
| OT-IL15-072 | EF1a | MDWTWILFLVAAATRVHSNWVNVISDL | 2827 | 5504 |
| (IgE leader- | | KKIEDLIQSMHIDATLYTESDVHPSCKVT | | |
| IL15-Linker | | AMKCFLLELQVISLESGDASIHDTVENLII | | |
| (SG3-(SG4)3- | | LANNSLSSNGNVTESGCKECEELEEKNIK | | |
| SG3-SLQ (SEQ | | EFLQSFVHIVQMFINTSSGGGSGGGGSGG | | |
| ID NO: 2730))- | | GGSGGGGSGGGSLQITCPPPMSVEHADI | | |
| IL15Ra-stop) | | WVKSYSLYSRERYICNSGFKRKAGTSSL | | |
| | | TECVLNKATNVAHWTTPSLKCIRDPALV | | |
| | | HQRPAPPSTVTTAGVTPQPESLSPSGKEP | | |
| | | AASSPSSNNTAATTAAIVPGSQLMPSKSP | | |
| | | STGTTEISSHESSHGTPSQTTAKNWELTA | | |
| | | SASHQPPGVYPQGHSDTTVAISTSTVLLC | | |
| | | GLSAVSLLACYLKSRQTPPLASVEMEAM | | |
| | | EALPVTWGTSSRDEDLENCSHHL* | | |
| OT-IL15-089 | EF1a | MDWTWILFLVAAATRVHSDYKDDDDK | 2842 | 5505 |
| (IgE leader- | | NWVNVISDLKKIEDLIQSMHIDATLYTES | | |
| FLAG-IL15- | | DVHPSCKVTAMKCFLLELQVISLESGDA | | |
| Linker (SG3- | | SIHDTVENLIILANNSLSSNGNVTESGCK | | |
| (SG4)3-SG3- | | ECEELEEKNIKEFLQSFVHIVQMFINTSSG | | |
| SLQ (SEQ ID | | GGSGGGGSGGGGSGGGGSGGGSLQYPY | | |
| NO: 2730))- | | DVPDYAITCPPPMSVEHADIWVKSYSLY | | |
| HA Tag- | | SRERYICNSGFKRKAGTSSLTECVLNKAT | | |
| IL15Ra-linker | | NVAHWTTPSLKCIRDPALVHQRPAPPST | | |
| (GSG)- | | VTTAGVTPQPESLSPSGKEPAASSPSSNN | | |
| ecDHFR (Amino | | TAATTAAIVPGSQLMPSKSPSTGTTEISSH | | |
| acid 2-159 of | | ESSHGTPSQTTAKNWELTASASHQPPGV | | |
| WT, R12Y, | | YPQGHSDTTVAISTSTVLLCGLSAVSLLA | | |
| Y100I)-stop) | | CYLKSRQTPPLASVEMEAMEALPVTWG | | |
| | | TSSRDEDLENCSHHLGSGISLIAALAVDY | | |
| | | VIGMENAMPWNLPADLAWFKRNTLNKP | | |
| | | VIMGRHTWESIGRPLPGRKNIILSSQPGT | | |
| | | DDRVTWVKSVDEAIAACGDVPEIMVIGG | | |
| | | GRVIEQFLPKAQKLYLTHIDAEVEGDTH | | |
| | | FPDYEPDDWESVFSEFHDADAQNSHSYC | | |
| | | FEILERR* | | |
| OT-IL15-109 | EF1a | MDWTWILFLVAAATRVHSNWVNVISDL | 2839 | 5502 |
| (IgE leader- | | KKIEDLIQSMHIDATLYTESDVHPSCKVT | | |
| IL15-Linker | | AMKCFLLELQVISLESGDASIHDTVENLII | | |
| (SG3-(SG4)3- | | LANNSLSSNGNVTESGCKECEELEEKNIK | | |
| SG3-SLQ (SEQ | | EFLQSFVHIVQMFINTSSGGGSGGGGSGG | | |
| ID NO: 2730))- | | GGSGGGGSGGGSLQITCPPPMSVEHADI | | |
| IL15Ra- | | WVKSYSLYSRERYICNSGFKRKAGTSSL | | |
| BamHI (GS)- | | TECVLNKATNVAHWTTPSLKCIRDPALV | | |
| stop) | | HQRPAPPSTVTTAGVTPQPESLSPSGKEP | | |
| | | AASSPSSNNTAATTAAIVPGSQLMPSKSP | | |
| | | STGTTEISSHESSHGTPSQTTAKNWELTA | | |
| | | SASHQPPGVYPQGHSDTTVAISTSTVLLC | | |
| | | GLSAVSLLACYLKSRQTPPLASVEMEAM | | |
| | | EALPVTWGTSSRDEDLENCSHHLGS* | | |
| OT-IL15-110 | EF1a | MDWTWILFLVAAATRVHSDYKDDDDK | 2843 | 5506 |
| (IgE leader- | | NWVNVISDLKKIEDLIQSMHIDATLYTES | | |
| FLAG-IL15- | | DVHPSCKVTAMKCFLLELQVISLESGDA | | |
| Linker (SG3- | | SIHDTVENLIILANNSLSSNGNVTESGCK | | |
| (SG4)3-SG3- | | ECEELEEKNIKEFLQSFVHIVQMFINTSSG | | |
| SLQ (SEQ ID | | GGSGGGGSGGGGSGGGGSGGGSLQYPY | | |
| NO: 2730))- | | DVPDYAITCPPPMSVEHADIWVKSYSLY | | |
| HA Tag- | | SRERYICNSGFKRKAGTSSLTECVLNKAT | | |
| IL15Ra- | | NVAHWTTPSLKCIRDPALVHQRPAPPST | | |
| BamHI (GS)- | | VTTAGVTPQPESLSPSGKEPAASSPSSNN | | |
| stop) | | TAATTAAIVPGSQLMPSKSPSTGTTEISSH | | |
| | | ESSHGTPSQTTAKNWELTASASHQPPGV | | |
| | | YPQGHSDTTVAISTSTVLLCGLSAVSLLA | | |
| | | CYLKSRQTPPLASVEMEAMEALPVTWG | | |
| | | TSSRDEDLENCSHHLGS* | | |
| OT-IL15-114 | EF1a | MDWTWILFLVAAATRVHSDYKDDDDK | 2844 | 5507 |
| (IgE leader- | | NWVNVISDLKKIEDLIQSMHIDATLYTES | | |
| FLAG-IL15- | | DVHPSCKVTAMKCFLLELQVISLESGDA | | |
| Linker (SG3- | | SIHDTVENLIILANNSLSSNGNVTESGCK | | |
| (SG4)3-SG3- | | ECEELEEKNIKEFLQSFVHIVQMFINTSSG | | |
| SLQ (SEQ ID | | GGSGGGGSGGGGSGGGGSGGGSLQYPY | | |
| NO: 2730))- | | DVPDYAITCPPPMSVEHADIWVKSYSLY | | |
| HA Tag- | | SRERYICNSGFKRKAGTSSLTECVLNKAT | | |
| IL15Ra-Linker | | NVAHWTTPSLKCIRDPALVHQRPAPPST | | |
| (GSG)-hDHFR | | VTTAGVTPQPESLSPSGKEPAASSPSSNN | | |
| (Amino acid 2- | | TAATTAAIVPGSQLMPSKSPSTGTTEISSH | | |
| 187 of WT; | | ESSHGTPSQTTAKNWELTASASHQPPGV | | |
| K185E)-stop) | | YPQGHSDTTVAISTSTVLLCGLSAVSLLA | | |
| | | CYLKSRQTPPLASVEMEAMEALPVTWG | | |
| | | TSSRDEDLENCSHHLGSGVGSLNCIVAV | | |
| | | SQNMGIGKNGDLPWPPLRNEFRYFQRM | | |
| | | TTTSSVEGKQNLVIMGKKTWFSIPEKNR | | |
| | | PLKGRINLVLSRELKEPPQGAHFLSRSLD | | |
| | | DALKLTEQPELANKVDMVWIVGGSSVY | | |
| | | KEAMNHPGHLKLFVTRIMQDFESDTFFP | | |
| | | EIDLEKYKLLPEYPGVLSDVQEEKGIKYK | | |
| | | FEVYEEND* | | |
| OT-IL15-115 | EF1a | MDWTWILFLVAAATRVHSDYKDDDDK | 2845 | 5508 |
| (IgE leader- | | NWVNVISDLKKIEDLIQSMHIDATLYTES | | |
| FLAG-IL15- | | DVHPSCKVTAMKCFLLELQVISLESGDA | | |
| Linker (SG3- | | SIHDTVENLIILANNSLSSNGNVTESGCK | | |
| (SG4)3-SG3- | | ECEELEEKNIKEFLQSFVHIVQMFINTSSG | | |
| SLQ (SEQ ID | | GGSGGGGSGGGGSGGGGSGGGSLQYPY | | |
| NO: 2730))- | | DVPDYAITCPPPMSVEHADIWVKSYSLY | | |
| HA Tag- | | SRERYICNSGFKRKAGTSSLIECVLNKAT | | |
| IL15Ra-Linker | | NVAHWTTPSLKCIRDPALVHQRPAPPST | | |
| (GSG)- | | VTTAGVTPQPESLSPSGKEPAASSPSSNN | | |
| hDHFR (Amino | | TAATTAAIVPGSQLMPSKSPSTGTTEISSH | | |
| acid 2-187 of | | ESSHGTPSQTTAKNWELTASASHQPPGV | | |
| WT; E162G, | | YPQGHSDTTVAISTSTVLLCGLSAVSLLA | | |
| I176F)-stop) | | CYLKSRQTPPLASVEMEAMEALPVTWG | | |
| | | TSSRDEDLENCSHHLGSGVGSLNCIVAV | | |
| | | SQNMGIGKNGDLPWPPLRNEFRYFQRM | | |
| | | TTTSSVEGKQNLVIMGKKTWFSIPEKNR | | |
| | | PLKGRINLVLSRELKEPPQGAHFLSRSLD | | |
| | | DALKLTEQPELANKVDMVWIVGGSSVY | | |
| | | KEAMNHPGHLKLFVTRIMQDFESDTFFP | | |
| | | EIDLEKYKLLPGYPGVLSDVQEEKGFKY | | |
| | | KFEVYEKND* | | |
| OT-IL15-116 | EF1a | MDWTWILFLVAAATRVHSDYKDDDDK | 2846 | 5509 |
| (IgE leader- | | NWVNVISDLKKIEDLIQSMHIDATLYTES | | |
| FLAG-IL15- | | DVHPSCKVTAMKCFLLELQVISLESGDA | | |
| Linker (SG3- | | SIHDTVENLIILANNSLSSNGNVTESGCK | | |
| (SG4)3-SG3- | | ECEELEEKNIKEFLQSFVHIVQMFINTSSG | | |
| SLQ (SEQ ID | | GGSGGGGSGGGGSGGGGSGGGSLQYPY | | |
| NO: 2730))- | | DVPDYAITCPPPMSVEHADIWVKSYSLY | | |
| HA Tag- | | SRERYICNSGFKRKAGTSSLTECVLNKAT | | |
| IL15Ra-Linker | | NVAHWTTPSLKCIRDPALVHQRPAPPST | | |
| (GSG)- | | VTTAGVTPQPESLSPSGKEPAASSPSSNN | | |
| hDHFR (Amino | | TAATTAAIVPGSQLMPSKSPSTGTTEISSH | | |
| acid 2-187 of | | ESSHGTPSQTTAKNWELTASASHQPPGV | | |
| WT; H131R, | | YPQGHSDTTVAISTSTVLLCGLSAVSLLA | | |
| E144G)-stop) | | CYLKSRQTPPLASVEMEAMEALPVTWG | | |
| | | TSSRDEDLENCSHHLGSGVGSLNCIVAV | | |
| | | SQNMGIGKNGDLPWPPLRNEFRYFQRM | | |
| | | TTTSSVEGKQNLVIMGKKTWFSIPEKNR | | |
| | | PLKGRINLVLSRELKEPPQGAHFLSRSLD | | |
| | | DALKLTEQPELANKVDMVWIVGGSSVY | | |
| | | KEAMNHPGRLKLFVTRIMQDFESDTFFP | | |
| | | EIDLEKYKLLPEYPGVLSDVQEEKGIKYK | | |
| | | FEVYEKND* | | |
| OT-IL15-117 | EF1a | MDWTWILFLVAAATRVHSDYKDDDDK | 2847 | 5510 |
| (IgE leader- | | NWVNVISDLKKIEDLIQSMHIDATLYTES | | |
| FLAG-IL15- | | DVHPSCKVTAMKCFLLELQVISLESGDA | | |
| Linker (SG3- | | SIHDTVENLIILANNSLSSNGNVTESGCK | | |
| (SG4)3-SG3- | | ECEELEEKNIKEFLQSFVHIVQMFINTSSG | | |
| SLQ (SEQ ID | | GGSGGGGSGGGGSGGGGSGGGSLQYPY | | |
| NO: 2730))- | | DVPDYAITCPPPMSVEHADIWVKSYSLY | | |
| HA Tag- | | SRERYICNSGFKRKAGTSSLTECVLNKAT | | |
| IL15Ra-Linker | | NVAHWTTPSLKCIRDPALVHQRPAPPST | | |
| (GSG)- | | VTTAGVTPQPESLSPSGKEPAASSPSSNN | | |
| hDHFR(Amino | | TAATTAAIVPGSQLMPSKSPSTGTTEISSH | | |
| acid 2-187 of | | ESSHGTPSQTTAKNWELTASASHQPPGV | | |
| WT; I17V)- | | YPQGHSDTTVAISTSTVLLCGLSAVSLLA | | |
| stop) | | CYLKSRQTPPLASVEMEAMEALPVTWG | | |
| | | TSSRDEDLENCSHHLGSGVGSLNCIVAV | | |
| | | SQNMGVGKNGDLPWPPLRNEFRYFQRM | | |
| | | TTTSSVEGKQNLVIMGKKTWFSIPEKNR | | |
| | | PLKGRINLVLSRELKEPPQGAHFLSRSLD | | |
| | | DALKLTEQPELANKVDMVWIVGGSSVY | | |
| | | KEAMNHPGHLKLFVTRIMQDFESDTFFP | | |
| | | EIDLEKYKLLPEYPGVLSDVQEEKGIKYK | | |
| | | FEVYEKND* | | |
| OT-IL15-118 | EF1a | MDWTWILFLVAAATRVHSDYKDDDDK | 2848 | 5511 |
| (IgE leader- | | NWVNVISDLKKIEDLIQSMHIDATLYTES | | |
| FLAG-IL15- | | DVHPSCKVTAMKCFLLELQVISLESGDA | | |
| Linker (SG3- | | SIHDTVENLIILANNSLSSNGNVTESGCK | | |
| (SG4)3-SG3- | | ECEELEEKNIKEFLQSFVHIVQMFINTSSG | | |
| SLQ (SEQ ID | | GGSGGGGSGGGGSGGGGSGGGSLQYPY | | |
| NO: 2730))- | | DVPDYAITCPPPMSVEHADIWVKSYSLY | | |
| HA Tag- | | SRERYICNSGFKRKAGTSSLTECVLNKAT | | |
| IL15Ra-Linker | | NVAHWTTPSLKCIRDPALVHQRPAPPST | | |
| (GSG)- | | VTTAGVTPQPESLSPSGKEPAASSPSSNN | | |
| hDHFR (Amino | | TAATTAAIVPGSQLMPSKSPSTGTTEISSH | | |
| acid 2-187 of | | ESSHGTPSQTTAKNWELTASASHQPPGV | | |
| WT, N127Y)- | | YPQGHSDTTVAISTSTVLLCGLSAVSLLA | | |
| stop) | | CYLKSRQTPPLASVEMEAMEALPVTWG | | |
| | | TSSRDEDLENCSHHLGSGVGSLNCIVAV | | |
| | | SQNMGIGKNGDLPWPPLRNEFRYFQRM | | |
| | | TTTSSVEGKQNLVIMGKKTWFSIPEKNR | | |
| | | PLKGRINLVLSRELKEPPQGAHFLSRSLD | | |
| | | DALKLTEQPELANKVDMVWIVGGSSVY | | |
| | | KEAMYHPGHLKLFVTRIMQDFESDTFFP | | |
| | | EIDLEKYKLLPEYPGVLSDVQEEKGIKYK | | |
| | | FEVYEKND* | | |
| OT-IL15-119 | EF1a | MDWTWILFLVAAATRVHSDYKDDDDK | 2849 | 5512 |
| (IgE leader- | | NWVNVISDLKKIEDLIQSMHIDATLYTES | | |
| FLAG-IL15- | | DVHPSCKVTAMKCFLLELQVISLESGDA | | |
| Linker (SG3- | | SIHDTVENLIILANNSLSSNGNVTESGCK | | |
| (SG4)3-SG3- | | ECEELEEKNIKEFLQSFVHIVQMFINTSSG | | |
| SLQ (SEQ ID | | GGSGGGGSGGGGSGGGGSGGGSLQYPY | | |
| NO: 2730))- | | DVPDYAITCPPPMSVEHADIWVKSYSLY | | |
| HA Tag- | | SRERYICNSGFKRKAGTSSLTECVLNKAT | | |
| IL15Ra-Linker | | NVAHWTTPSLKCIRDPALVHQRPAPPST | | |
| (GSG)- | | VTTAGVTPQPESLSPSGKEPAASSPSSNN | | |
| hDHFR (Amino | | TAATTAAIVPGSQLMPSKSPSTGTTEISSH | | |
| acid 2-187 of | | ESSHGTPSQTTAKNWELTASASHQPPGV | | |
| WT, I17V, | | YPQGHSDTTVAISTSTVLLCGLSAVSLLA | | |
| Y122I)-stop) | | CYLKSRQTPPLASVEMEAMEALPVTWG | | |
| | | TSSRDEDLENCSHHLGSGVGSLNCIVAV | | |
| | | SQNMGVGKNGDLPWPPLRNEFRYFQRM | | |
| | | TTTSSVEGKQNLVIMGKKTWFSIPEKNR | | |
| | | PLKGRINLVLSRELKEPPQGAHFLSRSLD | | |
| | | DALKLTEQPELANKVDMVWIVGGSSVIK | | |
| | | EAMNHPGHLKLFVTRIMQDFESDTFFPEI | | |
| | | DLEKYKLLPEYPGVLSDVQEEKGIKYKF | | |
| | | EVYEKND* | | |
| OT-IL15-128 | EF1a | MDWTWILFLVAAATRVHSNWVNVISDL | 2850 | 5513 |
| (IgE leader- | | KKIEDLIQSMHIDATLYTESDVHPSCKVT | | |
| IL15-Linker | | AMKCFLLELQVISLESGDASIHDTVENLII | | |
| (SG3-(SG4)3- | | LANNSLSSNGNVTESGCKECEELEEKNIK | | |
| SG3-SLQ (SEQ | | EFLQSFVHIVQMFINTSSGGGSGGGGSGG | | |
| ID NO: 2730))- | | GGSGGGGSGGGSLQITCPPPMSVEHADI | | |
| IL15Ra-Spacer- | | WVKSYSLYSRERYICNSGFKRKAGTSSL | | |
| Flagx3- | | TECVLNKATNVAHWTTPSLKCIRDPALV | | |
| Spacer-BamHI | | HQRPAPPSTVTTAGVTPQPESLSPSGKEP | | |
| (GS)-P2A | | AASSPSSNNTAATTAAIVPGSQLMPSKSP | | |
| cleavable | | STGTTEISSHESSHGTPSQTTAKNWELTA | | |
| peptide- | | SASHQPPGVYPQGHSDTTVAISTSTVLLC | | |
| mCherry | | GLSAVSLLACYLKSRQTPPLASVEMEAM | | |
| (M1L)-stop) | | EALPVTWGTSSRDEDLENCSHHLSRMD | | |
| | | YKDDDDKDYKDDDDKDYKDDDDKSRG | | |
| | | SGATNFSLLKQAGDVEENPGPLSKGEED | | |
| | | NMAIIKEFMRFKVHMEGSVNGHEFEIEG | | |
| | | EGEGRPYEGTQTAKLKVTKGGPLPFAW | | |
| | | DILSPQFMYGSKAYVKHPADIPDYLKLSF | | |
| | | PEGFKWERVMNFEDGGVVTVTQDSSLQ | | |
| | | DGEFIYKVKLRGTNFPSDGPVMQKKTM | | |
| | | GWEASSERMYPEDGALKGEIKQRLKLK | | |
| | | DGGHYDAEVKTTYKAKKPVQLPGAYN | | |
| | | VNIKLDITSHNEDYTIVEQYERAEGRHST | | |
| | | GGMDELYK* | | |
| OT-IL15-129 | EF1a | MDWTWILFLVAAATRVHSNWVNVISDL | 2851 | 5514 |
| (IgE leader- | | KKIEDLIQSMHIDATLYTESDVHPSCKVT | | |
| IL15-Linker | | AMKCFLLELQVISLESGDASIHDTVENLII | | |
| (SG3-(SG4)3- | | LANNSLSSNGNVTESGCKECEELEEKNIK | | |
| SG3-SLQ (SEQ | | EFLQSFVHIVQMFINTSSGGGSGGGGSGG | | |
| ID NO: 2730))- | | GGSGGGGSGGGSLQITCPPPMSVEHADI | | |
| 1L15Ra-BamHI | | WVKSYSLYSRERYICNSGFKRKAGTSSL | | |
| (GS)-P2A | | TECVLNKATNVAHWTTPSLKCIRDPALV | | |
| cleavable | | HQRPAPPSTVTTAGVTPQPESLSPSGKEP | | |
| peptide- | | AASSPSSNNTAATTAAIVPGSQLMPSKSP | | |
| mCherry | | STGTTEISSHESSHGTPSQTTAKNWELTA | | |
| (M1L)-stop) | | SASHQPPGVYPQGHSDTTVAISTSTVLLC | | |
| | | GLSAVSLLACYLKSRQTPPLASVEMEAM | | |
| | | EALPVTWGTSSRDEDLENCSHHLGSGAT | | |
| | | NFSLLKQAGDVEENPGPLSKGEEDNMAI | | |
| | | IKEFMRFKVHMEGSVNGHEFEIEGEGEG | | |
| | | RPYEGTQTAKLKVTKGGPLPFAWDILSP | | |
| | | QFMYGSKAYVKHPADIPDYLKLSFPEGF | | |
| | | KWERVMNFEDGGVVTVTQDSSLQDGEF | | |
| | | IYKVKLRGTNFPSDGPVMQKKTMGWEA | | |
| | | SSERMYPEDGALKGEIKQRLKLKDGGH | | |
| | | YDAEVKTTYKAKKPVQLPGAYNVNIKL | | |
| | | DITSHNEDYTIVEQYERAEGRHSTGGMD | | |
| | | ELYK* | | |

TABLE 30
IL15/IL15Ra constructs

| | | | | Amino | |
|---|---|---|---|---|---|
| | | | | Acid | Nucleic Acid |
| Construct | Sequence | | | SEQ ID | SEQ ID NO/ |
| Description | Description | Promoter | Amino acid sequences | NO | Sequence |
| OT-IL15- | Full | EF1a | MDWTWILFLVAAATRVHSN | 2852- | 5515 |
| 122 (IgE | construct | | WVNVISDLKKIEDLIQSMHID | 2867 | |
| leader- | | | ATLYTESDVHPSCKVTAMKC | | |
| IL15- | | | FLLELQVISLESGDASIHDTVE | | |
| linker (GS)- | | | NLIILANNSLSSNGNVTESGC | | |
| hDHFR | | | KECEELEEKNIKEFLQSFVHIV | | |
| (Amino acid | | | QMFINTSGSVGSLNCIVAVSQ | | |
| 2-187 of | | | NMGIGKNGDLPWPPLRNEFR | | |
| WT, Y122I)- | | | YFQRMTTTSSVEGKQNLVIM | | |
| stop- | | | GKKTWFSIPEKNRPLKGRINL | | |
| spacer- | | | VLSRELKEPPQGAHFLSRSLD | | |
| IRES- | | | DALKLTEQPELANKVDMVWI | | |
| spacer- | | | VGGSSVIKEAMNHPGHLKLF | | |
| mCherry- | | | VTRIMQDFESDTFFPEIDLEKY | | |
| stop) | | | KLLPEYPGVLSDVQEEKGIKY | | |
| | | | KFEVYEKND*SR*YDSLEIPPL | | |
| | | | SLPPP*RYWPKPLGIRPVCVC | | |
| | | | LYVIFHHIAVFWQCEGPETWP | | |
| | | | CLLDEHS*GSFPSRQRNARSV | | |
| | | | ECREGSSSSGSFLKTNNVCSD | | |
| | | | PLQAAEPPTWRQVPLRPKAT | | |
| | | | CIRYTCKGGTTPVPRCELDSC | | |
| | | | GKSQMALLKRIQQGAEGCPE | | |
| | | | GTPLYGI*SGASVHMLYMCL | | |
| | | | VEVKKTSRPPEPRGRGFPLKN | | |
| | | | TMIIWPQP**ARARRITWPSSR | | |
| | | | SSCASRCTWRAP*TATSSRSR | | |
| | | | ARARAAPTRAPRPPS*R*PRV | | |
| | | | APCPSPGTSCPLSSCTAPRPT* | | |
| | | | STPPTSPTT*SCPSPRASSGSA* | | |
| | | | *TSRTAAW*P*PRTPPCRTASS | | |
| | | | STR*SCAAPTSPPTAP*CRRRP | | |
| | | | WAGRPPPSGCTPRTAP*RARS | | |
| | | | SRG*S*RTAATTTLRSRPPTRP | | |
| | | | RSPCSCPAPTTSTSSWTSPPTT | | |
| | | | RTTPSWNSTNAPRAATPPAA | | |
| | | | WTSCTS | | |
| | IgE leader- | — | MDWTWILFLVAAATRVHSN | 2868 | 5516 |
| | IL15- | | WVNVISDLKKIEDLIQSMHID | | |
| | linker (GS)- | | ATLYTESDVHPSCKVTAMKC | | |
| | hDHFR | | FLLELQVISLESGDASIHDTVE | | |
| | (Amino acid | | NLIILANNSLSSNGNVTESGC | | |
| | 2-187 of | | KECEELEEKNIKEFLQSFVHIV | | |
| | WT, Y122I)- | | QMFINTSGSVGSLNCIVAVSQ | | |
| | stop | | NMGIGKNGDLPWPPLRNEFR | | |
| | | | YFQRMTTTSSVEGKQNLVIM | | |
| | | | GKKTWFSIPEKNRPLKGRINL | | |
| | | | VLSRELKEPPQGAHFLSRSLD | | |
| | | | DALKLTEQPELANKVDMVWI | | |
| | | | VGGSSVIKEAMNHPGHLKLF | | |
| | | | VTRIMQDFESDTFFPEIDLEKY | | |
| | | | KLLPEYPGVLSDVQEEKGIKY | | |
| | | | KFEVYEKND* | | |
| | mCherry- | — | MSKGEEDNMAIIKEFMRFKV | 2869 | 5517 |
| | stop | | HMEGSVNGHEFEIEGEGEGRP | | |
| | | | YEGTQTAKLKVTKGGPLPFA | | |
| | | | WDILSPQFMYGSKAYVKHPA | | |
| | | | DIPDYLKLSFPEGFKWERVM | | |
| | | | NFEDGGVVTVTQDSSLQDGE | | |
| | | | FIYKVKLRGTNFPSDGPVMQ | | |
| | | | KKTMGWEASSERMYPEDGA | | |
| | | | LKGEIKQRLKLKDGGHYDAE | | |
| | | | VKTTYKAKKPVQLPGAYNV | | |
| | | | NIKLDITSHNEDYTIVEQYER | | |
| | | | AEGRHSTGGMDELYK* | | |
| OT-IL15- | Full | EF1a | MDWTWILFLVAAATRVHSN | 2870- | 5518 |
| 123 and OT- | construct | | WVNVISDLKKIEDLIQSMHID | 2879 | |
| IL15- | | | ATLYTESDVHPSCKVTAMKC | | |
| 127(IgE | | | FLLELQVISLESGDASIHDTVE | | |
| leader- | | | NLIILANNSLSSNGNVTESGC | | |
| IL15- | | | KECEELEEKNIKEFLQSFVHIV | | |
| BamHI (GS)- | | | QMFINTSGS*NLDNTTH*RSR | | |
| stop- | | | PSPSPPPNVTGRSRLE*GRCAF | | |
| spacer- | | | VYMLFSTILPSFGNVRARKPG | | |
| IRES- | | | PVFLTSIPRGLSPLAKGMQGL | | |
| spacer- | | | LNVVKEAVPLEAS*RQTTSVA | | |
| mCherry- | | | TLCRQRNPPPGDRCLCGQKP | | |
| stop) | | | RV*DTPAKAAQPQCHVVSWI | | |
| | | | VVERVKWLSSSVFNKGLKDA | | |
| | | | QKVPHCMGSDLGPRCTCFTC | | |
| | | | V*SRLKKRLGPPNHGDVVFL* | | |
| | | | KTR**YGHNHDEQGRGG*HG | | |
| | | | HHQGVHALQGAHGGLRERP | | |
| | | | RVRDRGRGRGPPLRGHPDRQ | | |
| | | | AEGDQGWPPALRLGHPVPSV | | |
| | | | HVRLQGLREAPRRHPRLLEA | | |
| | | | VLPRGLQVGARDELRGRRRG | | |
| | | | DRDPGLLPAGRRVHLQGEAA | | |
| | | | RHQLPLRRPRNAEEDHGLGG | | |
| | | | LLRADVPRGRRPEGRDQAEA | | |
| | | | EAEGRRPLRR*GQDHLQGQE | | |
| | | | ARAAARRLQRQHQVGHHLP | | |
| | | | QRGLHHRGTVRTRRGPPLHR | | |
| | | | RHGRAVQV | | |
| | IgE leader- | — | MDWTWILFLVAAATRVHSN | 2880 | 5519 |
| | IL15- | | WVNVISDLKKIEDLIQSMHID | | |
| | BamHI (GS)- | | ATLYTESDVHPSCKVTAMKC | | |
| | stop | | FLLELQVISLESGDASIHDTVE | | |
| | | | NLIILANNSLSSNGNVTESGC | | |
| | | | KECEELEEKNIKEFLQSFVHIV | | |
| | | | QMFINTSGS* | | |
| | mCherry- | — | MSKGEEDNMAIIKEFMRFKV | 2881 | 5520 |
| | stop | | HMEGSVNGHEFEIEGEGEGRP | | |
| | | | YEGTQTAKLKVTKGGPLPFA | | |
| | | | WDILSPQFMYGSKAYVKHPA | | |
| | | | DIPDYLKLSFPEGFKWERVM | | |
| | | | NFEDGGVVTVTQDSSLQDGE | | |
| | | | FIYKVKLRGTNFPSDGPVMQ | | |
| | | | KKTMGWEASSERMYPEDGA | | |
| | | | LKGEIKQRLKLKDGGHYDAE | | |
| | | | VKTTYKAKKPVQLPGAYNV | | |
| | | | NIKLDITSHNEDYTIVEQYER | | |
| | | | AEGRHSTGGMDELYK* | | |

[0621] In some aspects, the DD-IL15/IL115Ra comprises the amino acid sequences provided in Table 31 with any combination of components in any order. IL15Ra may be fused to DD by the amino acid sequence SG. Examples of DD-IL15/IL15Ra are provided in Table 32 and Table 33c. The amino acid sequences in Tables 31, 32 and 33 may comprise a stop codon which is denoted in the table with a “*k” at the end of the amino acid sequence.

TABLE 31
IL15/IL15Ra construct regions

| | | Amino | |
|---|---|---|---|
| | | Acid | Nucleic Acid |
| | | SEQ ID | SEQ ID NO/ |
| Description | Amino acid sequences | NO | Sequence |
| IgE leader | MDWTWILFLVAAATRVHS | 2802 | 5419-5421 |
| IL15RA | MAPRRARGCRTLGLPALLLLLLLRPPATRG | 2882 | 5521 |
| Leader | | | |
| Linker | SGGGSGGGGSGGGGSGGGGSGGGSLQ | 2883 | 5522-5526 |
| (SG3- | | | |
| (SG4)3- | | | |
| SG3-SLQ) | | | |
| Linker | SGGGS | 2884 | 5527-5529 |
| (SG3S) | | | |
| Linker | SGGGSGGGGSGGGGSGGGGSGGGGSGGGGSGGGS | 2885 | 5530 |
| (SG3(SG4)5 | | | |
| SG3S) | | | |
| Linker | SGGGSGGGGSGGGGSGGGGS | 2886 | 5531 |
| Linker | GS | — | GGTTCC |
| Linker | SG | — | AGCGGC |
| Linker | GSG | — | GGATCCGGA |
| | | | or |
| | | | GGATCCGGT |
| Spacer | — | — | 5532-5534, |
| | | | TCGCGAATG |
| | | | or TCGCA |
| CD8a Hinge | TTTPAPRPPTPAPTIASQPLSLRPEACRPAAGGAVHTRG | 2887 | 5535 |
| | LDFACDIYIWAPLAGTCGVLLLSLVITLYC | | |
| IL15 | NWVNVISDLKKIEDLIQSMHIDATLYTESDVHPSCKVT | 718 | 5434-5436 |
| | AMKCFLLELQVISLESGDASIHDTVENLIILANNSLSSN | | (each include |
| | GNV1ESGCKECEELEEKNIKEFLQSFVHIVQMFINTS* | | the stop codon |
| | | | at the end), |
| | | | 5437-5439 |
| IL15Ra | ITCPPPMSVEHADIWVKSYSLYSRERYICNSGFKRKAG | 724 | 5536 (includes |
| | TSSLTECVLNKATNVAHWTTPSLKCIRDPALVHQRPAP | | the stop codon |
| | PSTVTTAGVTPQPESLSPSGKEPAASSPSSNNTAATTAA | | at the end), |
| | IVPGSQLMPSKSPSTGTTEISSHESSHGTPSQTTAKNWE | | 5537-5540 |
| | LTASASHQPPGVYPQGHSDTTVAISTSTVLLCGLSAVSL | | |
| | LACYLKSRQTPPLASVEMEAMEALPVTWGTSSRDEDL | | |
| | ENCSHHL* | | |
| IL15Ra (31- | ITCPPPMSVEHADIWVKSYSLYSRERYICNSGFKRKAG | 725 | 5541 |
| 205 of | TSSLTECVLNKATNVAHWTTPSLKCIRDPALVHQRPAP | | |
| Uniprot ID: | PSTVTTAGVTPQPESLSPSGKEPAASSPSSNNTAATTAA | | |
| Q13261.1) | IVPGSQLMPSKSPSTGTTEISSHESSHGTPSQTTAKNWE | | |
| | LTASASHQPPGVYPQGHSDTT | | |
| mCherry | MSKGEEDNMAIIKEFMRFKVHMEGSVNGHEFEIEGEG | 2888 | 5542 |
| | EGRPYEGTQTAKLKVTKGGPLPFAWDILSPQFMYGSK | | |
| | AYVKHPADIPDYLKLSFPEGFKWERVMNFEDGGVVTV | | |
| | TQDSSLQDGEFIYKVKLRGTNFPSDGPVMQKKTMGWE | | |
| | ASSERMYPEDGALKGEIKQRLKLKDGGHYDAEVKTTY | | |
| | KAKKPVQLPGAYNVNIKLDITSHNEDYTIVEQYERAEG | | |
| | RHSTGGMDELYK* | | |
| mCherry | LSKGEEDNMAIIKEFMRFKVHMEGSVNGHEFEIEGEGE | 2807 | 5432 |
| (M1L) | GRPYEGTQTAKLKVTKGGPLPFAWDILSPQFMYGSKA | | |
| | YVKHPADIPDYLKLSFPEGFKWERVMNFEDGGVVTVT | | |
| | QDSSLQDGEFIYKVKLRGTNFPSDGPVMQKKTMGWEA | | |
| | SSERMYPEDGALKGEIKQRLKLKDGGHYDAEVKTTYK | | |
| | AKKPVQLPGAYNVNIKLDITSHNEDYTIVEQYERAEGR | | |
| | HSTGGMDELYK | | |
| HA Tag | YPYDVPDYA | 2805 | 5429-5430 |
| Flag | DYKDDDDK | 2744 | 5543 |
| BamHI | GS | — | GGATCC |
| P2A | GATNFSLLKQAGDVEENPGP | 2806 | 5431 |
| Cleavable | | | |
| Peptide | | | |
| ecDHFR | ISLIAALAVDYVIGMENAMPWNLPADLAWFKRNTLNK | 2808 | 5440-5442 |
| (Amino acid | PVIMGRHTWESIGRPLPGRKNIILSSQPGTDDRVTWVKS | | (inlcudes stop |
| 2-159 of | VDEAIAACGDVPEIMVIGGGRVIEQFLPKAQKLYLTHID | | codon) |
| WT; R12Y, | AEVEGDTHFPDYEPDDWESVFSEFHDADAQNSHSYCF | | |
| Y100I) | EILERR* | | |
| ecDHFR | ISLIAALAVDHVIGMENAMPWNLPADLAWFKRNTLNK | 2889 | 5544 (includes |
| (Amino acid | PVIMGRHTWESIGRPLPGRKNIILSSQPGTDDRVTWVKS | | stop codon), |
| 2-159 of | VDEAIAACGDVPEIMVIGGGRVYEQFLPKAQKLYLTHI | | 5545 |
| WT; R12H, | DAEVEGDTHFPDYKPDDWESVFSEFHDADAQNSHSYC | | |
| E129K) | FEILERR* | | |
| FKBP | GVQVETISPGDGRTFPKRGQTCVVHYTGMLGDGKKVD | 2890 | 5546-5549 |
| (E31G, | SSRDRNKPFKFMLGKQEVIRGWEEGVAQMSVGQGAK | | (each includes |
| F36V, | LTISPDYAYGATGHPGIIPPHATLVFDVELLELE* | | stop codon) |
| R71G, | | | |
| K105E) | | | |
| hDHFR | VGSLNCIVAVSQNMGIGKNGDLPWPPLRNEFRYFQRM | 2891 | 5550-5552 |
| (Amino acid | TTTSSVEGKQNLVIMGKKTWFSIPEKNRPLKGRINLVLS | | (includes stop |
| 2-187 of | RELKEPPQGAHFLSRSLDDALKLTEQPELANKVDMVW | | codon) |
| WT; Y122I, | IVGGSSVIKEFMNHPGHLKLFVTRIMQDFESDTFFPEID | | |
| A125F) | LEKYKLLPEYPGVLSDVQEEKGIKYKFEVYEKND* | | |
| hDHFR | VGSLNCIVAVSQNMGIGKNGDLPWPPLRNEFRYFFRM | 2892 | 5553-5555 |
| (Amino acid | TTTSSVEGKQNLVIMGKKTWFSIPEKFRPLKGRINLVLS | | (includes stop |
| 2-187 of | RELKEPPQGAHFLSRSLDDALKLTEQPELANKVDMVW | | codon) |
| WT; Q36F, | IVGGSSVIKEAMNHPGHLKLFVTRIMQDFESDTFFPEID | | |
| N65F, | LEKYKLLPEYPGVLSDVQEEKGIKYKFEVYEKND* | | |
| Y122I) | | | |
| hDHFR | VGSLNCIVAVSQNMGIGKNGDLPWPPLRNEFRYFQRM | 2893 | 5556 |
| (Amino acid | TTTSSVEGKQNLVIMGKKTWFSIPEKNRPLKGRINLVLS | | |
| 2-187 of | RELKEPPQGAHFLSRSLDDALKLTEQPELANKVDMVW | | |
| WT; | IVGGSSVYKEAMNHPGHLKLFVTRIMQDFESDTFFPEID | | |
| K185E) | LEKYKLLPEYPGVLSDVQEEKGIKYKFEVYEEND* | | |
| hDHFR | VGSLNCIVAVSQNMGIGKNGDLPWPPLRNEFRYFQRM | 2894 | 5557 (includes |
| (Amino acid | TTTSSVEGKQNLVIMGKKTWFSIPEKNRPLKGRINLVLS | | stop codon), |
| 2-187 of | RELKEPPQGAHFLSRSLDDALKLTEQPELANKVDMVW | | 5558 |
| WT; E162G, | IVGGSSVYKEAMNHPGHLKLFVTRIMQDFESDTFFPEID | | |
| I176F) | LEKYKLLPGYPGVLSDVQEEKGFKYKFEVYEKND* | | |
| hDHFR | VGSLNCIVAVSQNMGIGKNGDLPWPPLRNEFRYFQRM | 2895 | 5559 |
| (Amino acid | TTTSSVEGKQNLVIMGKKTWFSIPEKNRPLKGRINLVLS | | |
| 2-187 of | RELKEPPQGAHFLSRSLDDALKLTEQPELANKVDMVW | | |
| WT; | IVGGSSVYKEAMYHPGHLKLFVTRIMQDFESDTFFPEID | | |
| N127Y) | LEKYKLLPEYPGVLSDVQEEKGIKYKFEVYEKND | | |
| hDHFR | VGSLNCIVAVSQNMGVGKNGDLPWPPLRNEFRYFQR | 2896 | 5560 |
| (Amino acid | MTTTSSVEGKQNLVIMGKKTWFSIPEKNRPLKGRINLV | | |
| 2-187 of | LSRELKEPPQGAHFLSRSLDDALKLTEQPELANKVDMV | | |
| WT; I17V) | WIVGGSSVYKEAMNHPGHLKLFVTRIMQDFESDTFFPE | | |
| | IDLEKYKLLPEYPGVLSDVQEEKGIKYKFEVYEKND | | |
| hDHFR | VGSLNCIVAVSQNMGVGKNGDLPWPPLRNEFRYFQR | 2897 | 5561 |
| (Amino acid | MTTTSSVEGKQNLVIMGKKTWFSIPEKNRPLKGRINLV | | |
| 2-187 of | LSRELKEPPQGAHFLSRSLDDALKLTEQPELANKVDMV | | |
| WT; I17V, | WIVGGSSVIKEAMNHPGHLKLFVTRIMQDFESDTFFPEI | | |
| Y122I) | DLEKYKLLPEYPGVLSDVQEEKGIKYKFEVYEKND | | |
| hDHFR | VGSLNCIVAVSQNMGIGKNGDLPWPPLRNEFRYFQRM | 2898 | 5562 |
| (Amino acid | TTTSSVEGKQNLVIMGKKTWFSIPEKNRPLKGRINLVLS | | |
| 2-187 of | RELKEPPQGAHFLSRSLDDALKLTEQPELANKVDMVW | | |
| WT; | IVGGSSVYKEAMNHPGRLKLFVTRIMQDFGSDTFFPEI | | |
| H131R, | DLEKYKLLPEYPGVLSDVQEEKGIKYKFEVYEKND | | |
| E144G) | | | |

TABLE 32
IL15/IL15Ra constructs

| | | | Amino | |
|---|---|---|---|---|
| | | | Acid | Nucleic Acid |
| | | | SEQ ID | SEQ ID NO/ |
| Description | Promoter | Amino acid sequences | NO | Sequence |
| OT-IL15- | EF1a | MDWTWILFLVAAATRVHSNWVNVISDLKKIE | 2899 | 5563 |
| 006 (IgE | | DLIQSMHIDATLYTESDVHPSCKVTAMKCFLL | | |
| signal | | ELQVISLESGDASIHDTVENLIILANNSLSSNG | | |
| sequence; | | NVTESGCKECEELEEKNIKEFLQSFVHIVQMFI | | |
| IL15; | | NTSSGGGSGGGGSGGGGSGGGGSGGGSLQIT | | |
| linker1 | | CPPPMSVEHADIWVKSYSLYSRERYICNSGFK | | |
| (SG3- | | RKAGTSSLTECVLNKATNVAHWTTPSLKCIR | | |
| (SG4)5- | | DPALVHQRPAPPSTVTTAGVTPQPESLSPSGK | | |
| SG3S (SEQ | | EPAASSPSSNNTAATTAAIVPGSQLMPSKSPST | | |
| ID NO: | | GTTEISSHESSHGTPSQTTAKNWELTASASHQ | | |
| 3087)); | | PPGVYPQGHSDTTVAISTSTVLLCGLSAVSLL | | |
| IL15Ra; | | ACYLKSRQTPPLASVEMEAMEALPVTWGTSS | | |
| 1inker2 | | RDEDLENCSHHLSGISLIAALAVDHVIGMENA | | |
| (GGSGG | | MPWNLPADLAWFKRNTLNKPVIMGRHTWES | | |
| (SEQ ID | | IGRPLPGRKNIILSSQPGTDDRVTWVKSVDEAI | | |
| NO: 2729)); | | AACGDVPEIMVIGGGRVYEQFLPKAQKLYLT | | |
| ecDHFR | | HIDAEVEGDTHFPDYKPDDWESVFSEFHDAD | | |
| (R12H, | | AQNSHSYCFEILERR* | | |
| E129K)) | | | | |
| OT-IL15- | EF1a | MDWTWILFLVAAATRVHSNWVNVISDLKKIE | 2900 | 5564 |
| 007 (IgE | | DLIQSMHIDATLYTESDVHPSCKVTAMKCFLL | | |
| signal | | ELQVISLESGDASIHDTVENLIILANNSLSSNG | | |
| sequence; | | NVTESGCKECEELEEKNIKEFLQSFVHIVQMFI | | |
| IL15; | | NTSSGGGSGGGGSGGGGSGGGGSGGGSLQIT | | |
| linker1 | | CPPPMSVEHADIWVKSYSLYSRERYICNSGFK | | |
| (SG3- | | RKAGTSSLTECVLNKATNVAHWTTPSLKCIR | | |
| (SG4)5- | | DPALVHQRPAPPSTVTTAGVTPQPESLSPSGK | | |
| SG3S (SEQ | | EPAASSPSSNNTAATTAAIVPGSQLMPSKSPST | | |
| ID NO: | | GTTEISSHESSHGTPSQTTAKNWELTASASHQ | | |
| 3087)); | | PPGVYPQGHSDTTVAISTSTVLLCGLSAVSLL | | |
| IL15Ra; | | ACYLKSRQTPPLASVEMEAMEALPVTWGTSS | | |
| 1inker2 | | RDEDLENCSHHLSGGVQVETISPGDGRTFPKR | | |
| (GGSGG | | GQTCVVHYTGMLGDGKKVDSSRDRNKPFKF | | |
| (SEQ ID | | MLGKQEVIRGWEEGVAQMSVGQGAKLTISPD | | |
| NO: 2729)); | | YAYGATGHPGIIPPHATLVFDVELLELE* | | |
| FKBP | | | | |
| (E31G, F36V, | | | | |
| R71G, | | | | |
| K105E)) | | | | |
| OT-IL15- | EF1a | MDWTWILFLVAAATRVHSNWVNVISDLKKIE | 2901 | 5565 |
| 008 (IgE | | DLIQSMHIDATLYTESDVHPSCKVTAMKCFLL | | |
| signal | | ELQVISLESGDASIHDTVENLIILANNSLSSNG | | |
| sequence- | | NVTESGCKECEELEEKNIKEFLQSFVHIVQMFI | | |
| IL15-linker | | NTSSGGGSGGGGSGGGGSGGGGSGGGSLQIT | | |
| (SG3- | | CPPPMSVEHADIWVKSYSLYSRERYICNSGFK | | |
| (SG4)3- | | RKAGTSSLTECVLNKATNVAHWTTPSLKCIR | | |
| SG3-SLQ | | DPALVHQRPAPPSTVTTAGVTPQPESLSPSGK | | |
| (SEQ ID | | EPAASSPSSNNTAATTAAIVPGSQLMPSKSPST | | |
| NO: 2730))- | | GTTEISSHESSHGTPSQTTAKNWELTASASHQ | | |
| IL15Ra- | | PPGVYPQGHSDTTVAISTSTVLLCGLSAVSLL | | |
| stop) | | ACYLKSRQTPPLASVEMEAMEALPVTWGTSS | | |
| | | RDEDLENCSHHL* | | |
| OT-IL15- | EF1a | MDWTWILFLVAAATRVHSNWVNVISDLKKIE | 2902 | 5566 |
| 009 (IgE | | DLIQSMHIDATLYTESDVHPSCKVTAMKCFLL | | |
| signal | | ELQVISLESGDASIHDTVENLIILANNSLSSNG | | |
| sequence- | | NVTESGCKECEELEEKNIKEFLQSFVHIVQMFI | | |
| IL15-linker | | NTSSGGGSGGGGSGGGGSGGGGSGGGSLQIT | | |
| (SG3- | | CPPPMSVEHADIWVKSYSLYSRERYICNSGFK | | |
| (SG4)3- | | RKAGTSSLTECVLNKATNVAHWTTPSLKCIR | | |
| SG3-SLQ | | DPALVHQRPAPPSTVTTAGVTPQPESLSPSGK | | |
| (SEQ ID | | EPAASSPSSNNTAATTAAIVPGSQLMPSKSPST | | |
| NO: 2730))- | | GTTEISSHESSHGTPSQTTAKNWELTASASHQ | | |
| IL15Ra- | | PPGVYPQGHSDTTVAISTSTVLLCGLSAVSLL | | |
| linker (SG)- | | ACYLKSRQTPPLASVEMEAMEALPVTWGTSS | | |
| ecDHFR | | RDEDLENCSHHLSGISLIAALAVDYVIGMENA | | |
| (Amino acid | | MPWNLPADLAWFKRNTLNKPVIMGRHTWES | | |
| 2-159 of | | IGRPLPGRKNIILSSQPGTDDRVTWVKSVDEA1 | | |
| WT; R12Y, | | AACGDVPEIMVIGGGRVIEQFLPKAQKLYLTH | | |
| Y100I)- | | IDAEVEGDTHFPDYEPDDWESVFSEFHDADA | | |
| stop) | | QNSHSYCFEILERR* | | |
| OT-IL15- | EF1a | MDWTWILFLVAAATRVHSNWVNVISDLKKIE | 2903 | 5567 |
| 010 (IgE | | DLIQSMHIDATLYTESDVHPSCKVTAMKCFLL | | |
| signal | | ELQVISLESGDASIHDTVENLIILANNSLSSNG | | |
| sequence- | | NVTESGCKECEELEEKNIKEFLQSFVHIVQMFI | | |
| IL15-linker | | NTSSGGGSGGGGSGGGGSGGGGSGGGSLQIT | | |
| (SG3- | | CPPPMSVEHADIWVKSYSLYSRERYICNSGFK | | |
| (SG4)3- | | RKAGTSSLTECVLNKATNVAHWTTPSLKCIR | | |
| SG3-SLQ | | DPALVHQRPAPPSTVTTAGVTPQPESLSPSGK | | |
| (SEQ ID | | EPAASSPSSNNTAATTAAIVPGSQLMPSKSPST | | |
| NO: 2730))- | | GTTEISSHESSHGTPSQTTAKNWELTASASHQ | | |
| IL15Ra- | | PPGVYPQGHSDTTVAISTSTVLLCGLSAVSLL | | |
| linker (SG)- | | ACYLKSRQTPPLASVEMEAMEALPVTWGTSS | | |
| hDHFR | | RDEDLENCSHHLSGVGSLNCIVAVSQNMGIG | | |
| (Y122I, | | KNGDLPWPPLRNEFRYFQRMTTTSSVEGKQN | | |
| A125F)- | | LVIMGKKTWFSIPEKNRPLKGRINLVLSRELK | | |
| stop) | | EPPQGAHFLSRSLDDALKLTEQPELANKVDM | | |
| | | VWIVGGSSVIKEFMNHPGHLKLFVTRIMQDFE | | |
| | | SDTFFPEIDLEKYKLLPEYPGVLSDVQEEKGIK | | |
| | | YKFEVYEKND* | | |
| OT-IL15- | EF1a | MDWTWILFLVAAATRVHSNWVNVISDLKKIE | 2904 | 5568 |
| 011 (IgE | | DLIQSMHIDATLYTESDVHPSCKVTAMKCFLL | | |
| signal | | ELQVISLESGDASIHDTVENLIILANNSLSSNG | | |
| sequence- | | NVTESGCKECEELEEKNIKEFLQSFVHIVQMFI | | |
| IL15-linker | | NTSSGGGSGGGGSGGGGSGGGGSGGGSLQIT | | |
| (SG3- | | CPPPMSVEHADIWVKSYSLYSRERYICNSGFK | | |
| (SG4)3- | | RKAGTSSLTECVLNKATNVAHWTTPSLKCIR | | |
| SG3-SLQ | | DPALVHQRPAPPSTVTTAGVTPQPESLSPSGK | | |
| (SEQ ID | | EPAASSPSSNNTAATTAAIVPGSQLMPSKSPST | | |
| NO: 2730))- | | GTTEISSHESSHGTPSQTTAKNWELTASASHQ | | |
| IL15Ra; | | PPGVYPQGHSDTTVAISTSTVLLCGLSAVSLL | | |
| linker (SG)- | | ACYLKSRQTPPLASVEMEAMEALPVTWGTSS | | |
| hDHFR | | RDEDLENCSHHLSGVGSLNCIVAVSQNMGIG | | |
| (Amino acid | | KNGDLPWPPLRNEFRYFFRMTTTSSVEGKQN | | |
| 2-187 of | | LVIMGKKTWFSIPEKFRPLKGRINLVLSRELKE | | |
| WT; Q36F, | | PPQGAHFLSRSLDDALKLTEQPELANKVDMV | | |
| N65F, | | WIVGGSSVIKEAMNHPGHLKLFVTRIMQDFES | | |
| Y122I)- | | DTFFPEIDLEKYKLLPEYPGVLSDVQEEKGIKY | | |
| stop) | | KFEVYEKND* | | |
| OT-IL15- | EF1a | MDWTWILFLVAAATRVHSNWVNVISDLKKIE | 2905 | 5569 |
| 017 (IgE | | DLIQSMHIDATLYTESDVHPSCKVTAMKCFLL | | |
| signal | | ELQVISLESGDASIHDTVENLIILANNSLSSNG | | |
| sequence- | | NVTESGCKECEELEEKNIKEFLQSFVHIVQMFI | | |
| IL15-linker | | NTSSGGGSGGGGSGGGGSGGGGSGGGSLQIT | | |
| (SG3- | | CPPPMSVEHADIWVKSYSLYSRERYICNSGFK | | |
| (SG4)3- | | RKAGTSSLTECVLNKATNVAHWTTPSLKCIR | | |
| SG3-SLQ | | DPALVHQRPAPPSTVTTAGVTPQPESLSPSGK | | |
| (SEQ ID | | EPAASSPSSNNTAATTAAIVPGSQLMPSKSPST | | |
| NO: 2730))- | | GTTEISSHESSHGTPSQTTAKNWELTASASHQ | | |
| IL15Ra- | | PPGVYPQGHSDTTVAISTSTVLLCGLSAVSLL | | |
| linker (SG)- | | ACYLKSRQTPPLASVEMEAMEALPVTWGTSS | | |
| hDHFR | | RDEDLENCSHHLSGVGSLNCIVAVSQNMGIG | | |
| (Amino acid | | KNGDLPWPPLRNEFRYFQRMTTTSSVEGKQN | | |
| 2-187 of | | LVIMGKKTWFSIPEKNRPLKGRINLVLSRELK | | |
| WT; | | EPPQGAHFLSRSLDDALKLTEQPELANKVDM | | |
| K185E)- | | VWIVGGSSVYKEAMNHPGHLKLFVTRIMQDF | | |
| stop) | | ESDTFFPEIDLEKYKLLPEYPGVLSDVQEEKGI | | |
| | | KYKFEVYEEND* | | |
| OT-IL15- | EF1a | MDWTWILFLVAAATRVHSNWVNVISDLKKIE | 2906 | 5570 |
| 018 (IgE | | DLIQSMHIDATLYTESDVHPSCKVTAMKCFLL | | |
| signal | | ELQVISLESGDASIHDTVENLIILANNSLSSNG | | |
| sequence- | | NVTESGCKECEELEEKNIKEFLQSFVHIVQMFI | | |
| IL15-linker | | NTSSGGGSGGGGSGGGGSGGGGSGGGSLQIT | | |
| (SG3- | | CPPPMSVEHADIWVKSYSLYSRERYICNSGFK | | |
| (SG4)3- | | RKAGTSSLTECVLNKATNVAHWTTPSLKCIR | | |
| SG3-SLQ | | DPALVHQRPAPPSTVTTAGVTPQPESLSPSGK | | |
| (SEQ ID | | EPAASSPSSNNTAATTAAIVPGSQLMPSKSPST | | |
| NO: 2730))- | | GTTEISSHESSHGTPSQTTAKNWELTASASHQ | | |
| IL15Ra- | | PPGVYPQGHSDTTVAISTSTVLLCGLSAVSLL | | |
| linker (SG)- | | ACYLKSRQTPPLASVEMEAMEALPVTWGTSS | | |
| hDHFR | | RDEDLENCSHHLSGVGSLNCIVAVSQNMGIG | | |
| (Amino acid | | KNGDLPWPPLRNEFRYFQRMTTTSSVEGKQN | | |
| 2-187 of | | LVIMGKKTWFSIPEKNRPLKGRINLVLSRELK | | |
| WT; E162G, | | EPPQGAHFLSRSLDDALKLTEQPELANKVDM | | |
| I176F)-stop) | | VWIVGGSSVYKEAMNHPGHLKLFVTRIMQDF | | |
| | | ESDTFFPEIDLEKYKLLPGYPGVLSDVQEEKG | | |
| | | FKYKFEVYEKND* | | |
| OT-IL15- | EF1a | MDWTWILFLVAAATRVHSNWVNVISDLKKIE | 2907 | 5571 |
| 038 (IgE | | DLIQSMHIDATLYTESDVHPSCKVTAMKCFLL | | |
| leader- | | ELQVISLESGDASIHDTVENLIILANNSLSSNG | | |
| IL15- | | NVTESGCKECEELEEKNIKEFLQSFVHIVQMFI | | |
| Linker | | NTSSGGGSGGGGSGGGGSGGGGSGGGSLQIT | | |
| (SG3- | | CPPPMSVEHADIWVKSYSLYSRERYICNSGFK | | |
| (SG4)3- | | RKAGTSSLTECVLNKATNVAHWTTPSLKCIR | | |
| SG3-SLQ | | DPALVHQRPAPPSTVTTAGVTPQPESLSPSGK | | |
| (SEQ ID | | EPAASSPSSNNTAATTAAIVPGSQLMPSKSPST | | |
| NO: 2730))- | | GTTEISSHESSHGTPSQTTAKNWELTASASHQ | | |
| IL15Ra- | | PPGVYPQGHSDTTVAISTSTVLLCGLSAVSLL | | |
| Linker (SG)- | | ACYLKSRQTPPLASVEMEAMEALPVTWGTSS | | |
| hDHFR | | RDEDLENCSHHLSGVGSLNCIVAVSQNMGIG | | |
| (Amino acid | | KNGDLPWPPLRNEFRYFQRMTTTSSVEGKQN | | |
| 2-187 of | | LVIMGKKTWFSIPEKNRPLKGRINLVLSRELK | | |
| WT; | | EPPQGAHFLSRSLDDALKLTEQPELANKVDM | | |
| N127Y)- | | VWIVGGSSVYKEAMYHPGHLKLFVTRIMQDF | | |
| stop) | | ESDTFFPEIDLEKYKLLPEYPGVLSDVQEEKGI | | |
| | | KYKFEVYEKND* | | |
| OT-IL15- | EF1a | MDWTWILFLVAAATRVHSNWVNVISDLKKIE | 2908 | 5572 |
| 051 (IgE | | DLIQSMHIDATLYTESDVHPSCKVTAMKCFLL | | |
| leader- | | ELQVISLESGDASIHDTVENLIILANNSLSSNG | | |
| IL15- | | NVTESGCKECEELEEKNIKEFLQSFVHIVQMFI | | |
| Linker | | NTSSGGGSGGGGSGGGGSGGGGSGGGSLQYP | | |
| (SG3- | | YDVPDYAITCPPPMSVEHADIWVKSYSLYSRE | | |
| (SG4)3- | | RYICNSGFKRKAGTSSLTECVLNKATNVAHW | | |
| SG3-SLQ | | TTPSLKCIRDPALVHQRPAPPSTVTTAGVTPQP | | |
| (SEQ ID | | ESLSPSGKEPAASSPSSNNTAATTAAIVPGSQL | | |
| NO: 2730))- | | MPSKSPSTGTTEISSHESSHGTPSQTTAKNWEL | | |
| HA Tag- | | TASASHQPPGVYPQGHSDTTVAISTSTVLLCG | | |
| IL15Ra- | | LSAVSLLACYLKSRQTPPLASVEMEAMEALP | | |
| stop) | | VTWGTSSRDEDLENCSHHL* | | |
| OT-IL15- | EF1a | MDWTWILFLVAAATRVHSNWVNVISDLKKIE | 2909 | 5573 |
| 053 (IgE | | DLIQSMHIDATLYTESDVHPSCKVTAMKCFLL | | |
| leader- | | ELQVISLESGDASIHDTVENLIILANNSLSSNG | | |
| IL15- | | NVTESGCKECEELEEKNIKEFLQSFVHIVQMFI | | |
| Linker | | NTSSGGGSGGGGSGGGGSGGGGSGGGGSGG | | |
| (SG3(SG4)5 | | GGSGGGSITCPPPMSVEHADIWVKSYSLYSRE | | |
| SG3S(SEQ | | RYICNSGFKRKAGTSSLTECVLNKATNVAHW | | |
| ID NO: | | TTPSLKCIRDPALVHQRPAPPSTVTTAGVTPQP | | |
| 3087))- | | ESLSPSGKEPAASSPSSNNTAATTAAIVPGSQL | | |
| IL15Ra- | | MPSKSPSTGTTEISSHESSHGTPSQTTAKNWEL | | |
| Stop) | | TASASHQPPGVYPQGHSDTTVAISTSTVLLCG | | |
| | | LSAVSLLACYLKSRQTPPLASVEMEAMEALP | | |
| | | VTWGTSSRDEDLENCSHHL* | | |
| OT-IL15- | EF1a | MDWTWILFLVAAATRVHSNWVNVISDLKKIE | 2910 | 5574 |
| 054 (IgE | | DLIQSMHIDATLYTESDVHPSCKVTAMKCFLL | | |
| leader- | | ELQVISLESGDASIHDTVENLIILANNSLSSNG | | |
| IL15- | | NVTESGCKECEELEEKNIKEFLQSFVHIVQMFI | | |
| Linker | | NTSSGGGSGGGGSGGGGSGGGGSYPYDVPDY | | |
| (SG3(SG4)3 | | ASGGGSITCPPPMSVEHADIWVKSYSLYSRER | | |
| S(SEQ ID | | YICNSGFKRKAGTSSLTECVLNKATNVAHWT | | |
| NO: 3088))- | | TPSLKCIRDPALVHQRPAPPSTVTTAGVTPQPE | | |
| HA Tag- | | SLSPSGKEPAASSPSSNNTAATTAAIVPGSQLM | | |
| Linker | | PSKSPSTGTTEISSHESSHGTPSQTTAKNWELT | | |
| (SG3S (SEQ | | ASASHQPPGVYPQGHSDTTVAISTSTVLLCGL | | |
| ID NO: | | SAVSLLACYLKSRQTPPLASVEMEAMEALPV | | |
| 3089))- | | TWGTSSRDEDLENCSHHL* | | |
| IL15Ra- | | | | |
| Stop) | | | | |
| OT-IL15- | EF1a | MDWTWILFLVAAATRVHSNWVNVISDLKKIE | 2911 | 5575 |
| 055 (IgE | | DLIQSMHIDATLYTESDVHPSCKVTAMKCFLL | | |
| leader- | | ELQVISLESGDASIHDTVENLIILANNSLSSNG | | |
| IL15- | | NVTESGCKECEELEEKNIKEFLQSFVHIVQMFI | | |
| Linker (SG)- | | NTSSGITCPPPMSVEHADIWVKSYSLYSRERYI | | |
| IL15Ra- | | CNSGFKRKAGTSSLTECVLNKATNVAHWTTP | | |
| Stop) | | SLKCIRDPALVHQRPAPPSTVTTAGVTPQPESL | | |
| | | SPSGKEPAASSPSSNNTAATTAAIVPGSQLMPS | | |
| | | KSPSTGTTEISSHESSHGTPSQTTAKNWELTAS | | |
| | | ASHQPPGVYPQGHSDTTVAISTSTVLLCGLSA | | |
| | | VSLLACYLKSRQTPPLASVEMEAMEALPVTW | | |
| | | GTSSRDEDLENCSHHL* | | |
| OT-IL15- | EF1a | MAPRRARGCRTLGLPALLLLLLLRPPATRGN | 2912 | 5576 |
| 060 (IL15Ra | | WVNVISDLKKIEDLIQSMHIDATLYTESDVHP | | |
| signal | | SCKVTAMKCFLLELQVISLESGDASIHDTVEN | | |
| peptide- | | LIILANNSLSSNGNVTESGCKECEELEEKNIKE | | |
| IL15- | | FLQSFVHIVQMFINTSSGGGSGGGGSGGGGSG | | |
| Linker | | GGGSGGGSLQITCPPPMSVEHADIWVKSYSLY | | |
| (SG3- | | SRERYICNSGFKRKAGTSSLTECVLNKATNVA | | |
| (SG4)3- | | HWTTPSLKCIRDPALVHQRPAPPSTVTTAGVT | | |
| SG3-SLQ | | PQPESLSPSGKEPAASSPSSNNTAATTAAIVPG | | |
| (SEQ ID | | SQLMPSKSPSTGTTEISSHESSHGTPSQTTAKN | | |
| NO: 2730))- | | WELTASASHQPPGVYPQGHSDTTVAISTSTVL | | |
| IL15Ra- | | LCGLSAVSLLACYLKSRQTPPLASVEMEAME | | |
| stop) | | ALPVTWGTSSRDEDLENCSHHL* | | |
| OT-IL15- | EF1a | MDWTWILFLVAAATRVHSNWVNVISDLKKIE | 2913 | 5577 |
| 063 (IgE | | DLIQSMHIDATLYTESDVHPSCKVTAMKCFLL | | |
| leader-IL15- | | ELQVISLESGDASIHDTVENLIILANNSLSSNG | | |
| Linker | | NVTESGCKECEELEEKNIKEFLQSFVHIVQMFI | | |
| (SG3- | | NTSSGGGSGGGGSGGGGSGGGGSGGGSLQIT | | |
| (SG4)3- | | CPPPMSVEHADIWVKSYSLYSRERYICNSGFK | | |
| SG3-SLQ | | RKAGTSSLTECVLNKATNVAHWTTPSLKCIR | | |
| (SEQ ID | | DPALVHQRPAPPSTVTTAGVTPQPESLSPSGK | | |
| NO: 2730))- | | EPAASSPSSNNTAATTAAIVPGSQLMPSKSPST | | |
| IL15Ra- | | GTTEISSHESSHGTPSQTTAKNWELTASASHQ | | |
| BamHI (GS)- | | PPGVYPQGHSDTTVAISTSTVLLCGLSAVSLL | | |
| stop) | | ACYLKSRQTPPLASVEMEAMEALPVTWGTSS | | |
| | | RDEDLENCSHHLGS* | | |
| OT-IL15- | EF1a | MDWTWILFLVAAATRVHSNWVNVISDLKKIE | 2901 | 5565 |
| 064 and OT- | | DLIQSMHIDATLYTESDVHPSCKVTAMKCFLL | | |
| IL15-071 | | ELQVISLESGDASIHDTVENLIILANNSLSSNG | | |
| (IgE leader- | | NVTESGCKECEELEEKNIKEFLQSFVHIVQMFI | | |
| IL15- | | NTSSGGGSGGGGSGGGGSGGGGSGGGSLQIT | | |
| Linker | | CPPPMSVEHADIWVKSYSLYSRERYICNSGFK | | |
| (SG3- | | RKAGTSSLTECVLNKATNVAHWTTPSLKCIR | | |
| (SG4)3- | | DPALVHQRPAPPSTVTTAGVTPQPESLSPSGK | | |
| SG3-SLQ | | EPAASSPSSNNTAATTAAIVPGSQLMPSKSPST | | |
| (SEQ ID | | GTTEISSHESSHGTPSQTTAKNWELTASASHQ | | |
| NO: 2730))- | | PPGVYPQGHSDTTVAISTSTVLLCGLSAVSLL | | |
| IL15Ra- | | ACYLKSRQTPPLASVEMEAMEALPVTWGTSS | | |
| stop) | | RDEDLENCSHHL* | | |
| OT-IL15- | EF1a | MDWTWILFLVAAATRVHSNWVNVISDLKKIE | 2902 | 5566 |
| 066 (IgE | | DLIQSMHIDATLYTESDVHPSCKVTAMKCFLL | | |
| leader- | | ELQVISLESGDASIHDTVENLIILANNSLSSNG | | |
| IL15- | | NVTESGCKECEELEEKNIKEFLQSFVHIVQMFI | | |
| Linker | | NTSSGGGSGGGGSGGGGSGGGGSGGGSLQIT | | |
| (SG3- | | CPPPMSVEHADIWVKSYSLYSRERYICNSGFK | | |
| (SG4)3- | | RKAGTSSLTECVLNKATNVAHWTTPSLKCIR | | |
| SG3-SLQ | | DPALVHQRPAPPSTVTTAGVTPQPESLSPSGK | | |
| (SEQ ID | | EPAASSPSSNNTAATTAAIVPGSQLMPSKSPST | | |
| NO: 2730))- | | GTTEISSHESSHGTPSQTTAKNWELTASASHQ | | |
| IL15Ra- | | PPGVYPQGHSDTTVAISTSTVLLCGLSAVSLL | | |
| Linker (SG) | | ACYLKSRQTPPLASVEMEAMEALPVTWGTSS | | |
| ecDHFR | | RDEDLENCSHHLSGISLIAALAVDYVIGMENA | | |
| (Amino acid | | MPWNLPADLAWFKRNTLNKPVIMGRHTWES | | |
| 2-159 of | | IGRPLPGRKNIILSSQPGTDDRVTWVKSVDEAI | | |
| WT, R12Y, | | AACGDVPEIMVIGGGRVIEQFLPKAQKLYLTH | | |
| Y100I)- | | IDAEVEGDTHFPDYEPDDWESVFSEFHDADA | | |
| stop) | | QNSHSYCFEILERR* | | |
| OT-IL15- | EF1a | MDWTWILFLVAAATRVHSNWVNVISDLKKIE | 2914 | 5578 |
| 067 (IgE | | DLIQSMHIDATLYTESDVHPSCKVTAMKCFLL | | |
| leader- | | ELQVISLESGDASIHDTVENLIILANNSLSSNG | | |
| IL15- | | NVTESGCKECEELEEKNIKEFLQSFVHIVQMFI | | |
| Linker | | NTSSGGGSGGGGSGGGGSGGGGSGGGSLQIT | | |
| (SG3- | | CPPPMSVEHADIWVKSYSLYSRERYICNSGFK | | |
| (SG4)3- | | RKAGTSSLTECVLNKATNVAHWTTPSLKCIR | | |
| SG3-SLQ | | DPALVHQRPAPPSTVTTAGVTPQPESLSPSGK | | |
| (SEQ ID | | EPAASSPSSNNTAATTAAIVPGSQLMPSKSPST | | |
| NO: 2730))- | | GTTEISSHESSHGTPSQTTAKNWELTASASHQ | | |
| IL15Ra- | | PPGVYPQGHSDTTVAISTSTVLLCGLSAVSLL | | |
| Linker (SG)- | | ACYLKSRQTPPLASVEMEAMEALPVTWGTSS | | |
| ecDHFR | | RDEDLENCSHHLSGISLIAALAVDYVIGMENA | | |
| (Amino acid | | MPWNLPADLAWFKRNTLNKPVIMGRHTWES | | |
| 2-159 of | | IGRPLPGRKNIILSSQPGTDDRVTWVKSVDEAI | | |
| WT, R12Y, | | AACGDVPEIMVIGGGRVIEQFLPKAQKLYLTH | | |
| Y100I)- | | IDAEVEGDTHFPDYEPDDWESVFSEFHDADA | | |
| stop) | | QNSHSYCFEILERR* | | |
| OT-IL15- | EF1a | MAPRRARGCRTLGLPALLLLLLLRPPATRGN | 2915 | 5579 |
| 068 (IL15Ra | | WVNVISDLKKIEDLIQSMHIDATLYTESDVHP | | |
| signal | | SCKVTAMKCFLLELQVISLESGDASIHDTVEN | | |
| peptide- | | LIILANNSLSSNGNVTESGCKECEELEEKNIKE | | |
| IL15- | | FLQSFVHIVQMFINTSSGGGSGGGGSGGGGSG | | |
| Linker | | GGGSGGGSLQITCPPPMSVEHADIWVKSYSLY | | |
| (SG3- | | SRERYICNSGFKRKAGTSSLTECVLNKATNVA | | |
| (SG4)3- | | HWTTPSLKCIRDPALVHQRPAPPSTVTTAGVT | | |
| SG3-SLQ | | PQPESLSPSGKEPAASSPSSNNTAATTAAIVPG | | |
| (SEQ ID | | SQLMPSKSPSTGTTEISSHESSHGTPSQTTAKN | | |
| NO: 2730))- | | WELTASASHQPPGVYPQGHSDTTVAISTSTVL | | |
| IL15Ra- | | LCGLSAVSLLACYLKSRQTPPLASVEMEAME | | |
| stop) | | ALPVTWGTSSRDEDLENCSHHL* | | |
| OT-IL15- | EF1a | MDWTWILFLVAAATRVHSNWVNVISDLKKIE | 2916 | 5580 |
| 069 (IgE | | DLIQSMHIDATLYTESDVHPSCKVTAMKCFLL | | |
| leader- | | ELQVISLESGDASIHDTVENLIILANNSLSSNG | | |
| IL15- | | NVTESGCKECEELEEKNIKEFLQSFVHIVQMFI | | |
| BamHI (GS)- | | NTSGSITCPPPMSVEHADIWVKSYSLYSRERYI | | |
| IL15Ra- | | CNSGFKRKAGTSSLTECVLNKATNVAHWTTP | | |
| stop) | | SLKCIRDPALVHQRPAPPSTVTTAGVTPQPESL | | |
| | | SPSGKEPAASSPSSNNTAATTAAIVPGSQLMPS | | |
| | | KSPSTGTTEISSHESSHGTPSQTTAKNWELTAS | | |
| | | ASHQPPGVYPQGHSDTTVAISTSTVLLCGLSA | | |
| | | VSLLACYLKSRQTPPLASVEMEAMEALPVTW | | |
| | | GTSSRDEDLENCSHHL* | | |
| OT-IL15- | EF1a | MAPRRARGCRTLGLPALLLLLLLRPPATRGN | 2915 | 5581 |
| 070 (IL15Ra | | WVNVISDLKKIEDLIQSMHIDATLYTESDVHP | | |
| signal | | SCKVTAMKCFLLELQVISLESGDASIHDTVEN | | |
| peptide- | | LIILANNSLSSNGNVTESGCKECEELEEKNIKE | | |
| IL15- | | FLQSFVHIVQMFINTSSGGGSGGGGSGGGGSG | | |
| Linker | | GGGSGGGSLQITCPPPMSVEHADIWVKSYSLY | | |
| (SG3- | | SRERYICNSGFKRKAGTSSLTECVLNKATNVA | | |
| (SG4)3- | | HWTTPSLKCIRDPALVHQRPAPPSTVTTAGVT | | |
| SG3-SLQ | | PQPESLSPSGKEPAASSPSSNNTAATTAAIVPG | | |
| (SEQ ID | | SQLMPSKSPSTGTTEISSHESSHGTPSQTTAKN | | |
| NO: 2730))- | | WELTASASHQPPGVYPQGHSDTTVAISTSTVL | | |
| IL15Ra- | | LCGLSAVSLLACYLKSRQTPPLASVEMEAME | | |
| stop) | | ALPVTWGTSSRDEDLENCSHHL* | | |
| OT-IL15- | EF1a | MDWTWILFLVAAATRVHSNWVNVISDLKKIE | 2901 | 5582 |
| 072 (IgE | | DLIQSMHIDATLYTESDVHPSCKVTAMKCFLL | | |
| leader-IL15- | | ELQVISLESGDASIHDTVENLIILANNSLSSNG | | |
| Linker | | NVTESGCKECEELEEKNIKEFLQSFVHIVQMFI | | |
| (SG3- | | NTSSGGGSGGGGSGGGGSGGGGSGGGSLQIT | | |
| (SG4)3- | | CPPPMSVEHADIWVKSYSLYSRERYICNSGFK | | |
| SG3-SLQ | | RKAGTSSLTECVLNKATNVAHWTTPSLKCIR | | |
| (SEQ ID | | DPALVHQRPAPPSTVTTAGVTPQPESLSPSGK | | |
| NO: 2730))- | | EPAASSPSSNNTAATTAAIVPGSQLMPSKSPST | | |
| IL15Ra- | | GTTEISSHESSHGTPSQTTAKNWELTASASHQ | | |
| stop) | | PPGVYPQGHSDTTVAISTSTVLLCGLSAVSLL | | |
| | | ACYLKSRQTPPLASVEMEAMEALPVTWGTSS | | |
| | | RDEDLENCSHHL* | | |
| OT-IL15- | EF1a | MDWTWILFLVAAATRVHSDYKDDDDKNWV | 2917 | 5583 |
| 089 (IgE | | NVISDLKKIEDLIQSMHIDATLYTESDVHPSCK | | |
| leader- | | VTAMKCFLLELQVISLESGDASIHDTVENLIIL | | |
| FLAG- | | ANNSLSSNGNVTESGCKECEELEEKNIKEFLQ | | |
| IL15- | | SFVHIVQMFINTSSGGGSGGGGSGGGGSGGG | | |
| Linker | | GSGGGSLQYPYDVPDYAITCPPPMSVEHADI | | |
| (SG3- | | WVKSYSLYSRERYICNSGFKRKAGTSSLTECV | | |
| (SG4)3- | | LNKATNVAHWTTPSLKCIRDPALVHQRPAPPS | | |
| SG3-SLQ | | TVTTAGVTPQPESLSPSGKEPAASSPSSNNTAA | | |
| (SEQ ID | | TTAAIVPGSQLMPSKSPSTGTTEISSHESSHGTP | | |
| NO: 2730))- | | SQTTAKNWELTASASHQPPGVYPQGHSDTTV | | |
| HA Tag- | | AISTSTVLLCGLSAVSLLACYLKSRQTPPLASV | | |
| IL15Ra- | | EMEAMEALPVTWGTSSRDEDLENCSHHLGSG | | |
| linker | | ISLIAALAVDYVIGMENAMPWNLPADLAWFK | | |
| (GSG) | | RNTLNKPVIMGRHTWESIGRPLPGRKNIILSSQ | | |
| ecDHFR | | PGTDDRVTWVKSVDEAIAACGDVPEIMVIGG | | |
| (Amino acid | | GRVIEQFLPKAQKLYLTHIDAEVEGDTHFPDY | | |
| 2-159 of | | EPDDWESVFSEFHDADAQNSHSYCFEILERR* | | |
| WT, R12Y, | | | | |
| Y100I)- | | | | |
| stop) | | | | |
| OT-IL15- | EF1a | MDWTWILFLVAAATRVHSNWVNVISDLKKIE | 2913 | 5577 |
| 109 (IgE | | DLIQSMHIDATLYTESDVHPSCKVTAMKCFLL | | |
| leader-IL15- | | ELQVISLESGDASIHDTVENLIILANNSLSSNG | | |
| Linker | | NVTESGCKECEELEEKNIKEFLQSFVHIVQMFI | | |
| (SG3- | | NTSSGGGSGGGGSGGGGSGGGGSGGGSLQIT | | |
| (SG4)3- | | CPPPMSVEHADIWVKSYSLYSRERYICNSGFK | | |
| SG3-SLQ | | RKAGTSSLTECVLNKATNVAHWTTPSLKCIR | | |
| (SEQ ID | | DPALVHQRPAPPSTVTTAGVTPQPESLSPSGK | | |
| NO: 2730))- | | EPAASSPSSNNTAATTAAIVPGSQLMPSKSPST | | |
| IL15Ra- | | GTTEISSHESSHGTPSQTTAKNWELTASASHQ | | |
| BamHI (GS)- | | PPGVYPQGHSDTTVAISTSTVLLCGLSAVSLL | | |
| stop) | | ACYLKSRQTPPLASVEMEAMEALPVTWGTSS | | |
| | | RDEDLENCSHHLGS* | | |
| OT-IL15- | EF1a | MDWTWILFLVAAATRVHSDYKDDDDKNWV | 2918 | 5584 |
| 110 (IgE | | NVISDLKKIEDLIQSMHIDATLYTESDVHPSCK | | |
| leader- | | VTAMKCFLLELQVISLESGDASIHDTVENLIIL | | |
| FLAG- | | ANNSLSSNGNVTESGCKECEELEEKNIKEFLQ | | |
| IL15- | | SFVHIVQMFINTSSGGGSGGGGSGGGGSGGG | | |
| Linker | | GSGGGSLQYPYDVPDYAITCPPPMSVEHADI | | |
| (SG3- | | WVKSYSLYSRERYICNSGFKRKAGTSSLTECV | | |
| (SG4)3- | | LNKATNVAHWTTPSLKCIRDPALVHQRPAPPS | | |
| SG3-SLQ | | TVTTAGVTPQPESLSPSGKEPAASSPSSNNTAA | | |
| (SEQ ID | | TTAAIVPGSQLMPSKSPSTGTTEISSHESSHGTP | | |
| NO: 2730))- | | SQTTAKNWELTASASHQPPGVYPQGHSDTTV | | |
| HA Tag- | | AISTSTVLLCGLSAVSLLACYLKSRQTPPLASV | | |
| IL15Ra- | | EMEAMEALPVTWGTSSRDEDLENCSHHLGS* | | |
| BamHI (GS)- | | | | |
| stop) | | | | |
| OT-IL15- | EF1a | MDWTWILFLVAAATRVHSDYKDDDDKNWV | 2919 | 5585 |
| 114 (IgE | | NVISDLKKIEDLIQSMHIDATLYTESDVHPSCK | | |
| leader- | | VTAMKCFLLELQVISLESGDASIHDTVENLIIL | | |
| FLAG- | | ANNSLSSNGNVTESGCKECEELEEKNIKEFLQ | | |
| IL15- | | SFVHIVQMFINTSSGGGSGGGGSGGGGSGGG | | |
| Linker | | GSGGGSLQYPYDVPDYAITCPPPMSVEHADI | | |
| (SG3- | | WVKSYSLYSRERYICNSGFKRKAGTSSLTECV | | |
| (SG4)3- | | LNKATNVAHWTTPSLKCIRDPALVHQRPAPPS | | |
| SG3-SLQ | | TVTTAGVTPQPESLSPSGKEPAASSPSSNNTAA | | |
| (SEQ ID | | TTAAIVPGSQLMPSKSPSTGTTEISSHESSHGTP | | |
| NO: 2730))- | | SQTTAKNWELTASASHQPPGVYPQGHSDTTV | | |
| HA Tag- | | AISTSTVLLCGLSAVSLLACYLKSRQTPPLASV | | |
| IL15Ra- | | EMEAMEALPVTWGTSSRDEDLENCSHHLGSG | | |
| Linker | | VGSLNCIVAVSQNMGIGKNGDLPWPPLRNEF | | |
| (GSG)- | | RYFQRMTTTSSVEGKQNLVIMGKKTWFSIPE | | |
| hDHFR | | KNRPLKGRINLVLSRELKEPPQGAHFLSRSLD | | |
| (Amino acid | | DALKLTEQPELANKVDMVWIVGGSSVYKEA | | |
| 2-187 of | | MNHPGHLKLFVTRIMQDFESDTFFPEIDLEKY | | |
| WT; | | KLLPEYPGVLSDVQEEKGIKYKFEVYEEND* | | |
| K185E)- | | | | |
| stop) | | | | |
| OT-IL15- | EF1a | MDWTWILFLVAAATRVHSDYKDDDDKNWV | 2920 | 5586 |
| 115 (IgE | | NVISDLKKIEDLIQSMHIDATLYTESDVHPSCK | | |
| leader- | | VTAMKCFLLELQVISLESGDASIHDTVENLIIL | | |
| FLAG- | | ANNSLSSNGNVTESGCKECEELEEKNIKEFLQ | | |
| IL15- | | SFVHIVQMFINTSSGGGSGGGGSGGGGSGGG | | |
| Linker | | GSGGGSLQYPYDVPDYAITCPPPMSVEHADI | | |
| (SG3- | | WVKSYSLYSRERYICNSGFKRKAGTSSLTECV | | |
| (SG4)3- | | LNKATNVAHWTTPSLKCIRDPALVHQRPAPPS | | |
| SG3-SLQ | | TVTTAGVTPQPESLSPSGKEPAASSPSSNNTAA | | |
| (SEQ ID | | TTAAIVPGSQLMPSKSPSTGTTEISSHESSHGTP | | |
| NO: 2730))- | | SQTTAKNWELTASASHQPPGVYPQGHSDTTV | | |
| HA Tag- | | AISTSTVLLCGLSAVSLLACYLKSRQTPPLASV | | |
| IL15Ra- | | EMEAMEALPVTWGTSSRDEDLENCSHHLGSG | | |
| Linker | | VGSLNCIVAVSQNMGIGKNGDLPWPPLRNEF | | |
| (GSG)- | | RYFQRMTTTSSVEGKQNLVIMGKKTWFSIPE | | |
| hDHFR | | KNRPLKGRINLVLSRELKEPPQGAHFLSRSLD | | |
| (Amino acid | | DALKLTEQPELANKVDMVWIVGGSSVYKEA | | |
| 2-187 of | | MNHPGHLKLFVTRIMQDFESDTFFPEIDLEKY | | |
| WT; E162G, | | KLLPGYPGVLSDVQEEKGFKYKFEVYEKND* | | |
| I176F)- | | | | |
| stop) | | | | |
| OT-IL15- | EF1a | MDWTWILFLVAAATRVHSDYKDDDDKNWV | 2921 | 5587 |
| 116 (IgE | | NVISDLKKIEDLIQSMHIDATLYTESDVHPSCK | | |
| leader- | | VTAMKCFLLELQVISLESGDASIHDTVENLIIL | | |
| FLAG- | | ANNSLSSNGNVTESGCKECEELEEKNIKEFLQ | | |
| IL15- | | SFVHIVQMFINTSSGGGSGGGGSGGGGSGGG | | |
| Linker | | GSGGGSLQYPYDVPDYAITCPPPMSVEHADI | | |
| (SG3- | | WVKSYSLYSRERYICNSGFKRKAGTSSLTECV | | |
| (SG4)3- | | LNKATNVAHWTTPSLKCIRDPALVHQRPAPPS | | |
| SG3-SLQ | | TVTTAGVTPQPESLSPSGKEPAASSPSSNNTAA | | |
| (SEQ ID | | TTAAIVPGSQLMPSKSPSTGTTEISSHESSHGTP | | |
| NO: 2730))- | | SQTTAKNWELTASASHQPPGVYPQGHSDTTV | | |
| HA Tag- | | AISTSTVLLCGLSAVSLLACYLKSRQTPPLASV | | |
| IL15Ra- | | EMEAMEALPVTWGTSSRDEDLENCSHHLGSG | | |
| Linker | | VGSLNCIVAVSQNMGIGKNGDLPWPPLRNEF | | |
| (GSG)- | | RYFQRMTTTSSVEGKQNLVIMGKKTWFSIPE | | |
| hDHFR | | KNRPLKGRINLVLSRELKEPPQGAHFLSRSLD | | |
| (Amino acid | | DALKLTEQPELANKVDMVWIVGGSSVYKEA | | |
| 2-187 of | | MNHPGRLKLFVTRIMQDFGSDTFFPEIDLEKY | | |
| WT; | | KLLPEYPGVLSDVQEEKGIKYKFEVYEKND* | | |
| H131R, | | | | |
| E144G)- | | | | |
| stop) | | | | |
| OT-IL15- | EF1a | MDWTWILFLVAAATRVHSDYKDDDDKNWV | 2922 | 5588 |
| 117 (IgE | | NVISDLKKIEDLIQSMHIDATLYTESDVHPSCK | | |
| leader- | | VTAMKCFLLELQVISLESGDASIHDTVENLIIL | | |
| FLAG- | | ANNSLSSNGNVTESGCKECEELEEKNIKEFLQ | | |
| IL15- | | SFVHIVQMFINTSSGGGSGGGGSGGGGSGGG | | |
| Linker | | GSGGGSLQYPYDVPDYAITCPPPMSVEHADI | | |
| (SG3- | | WVKSYSLYSRERYICNSGFKRKAGTSSLTECV | | |
| (SG4)3- | | LNKATNVAHWTTPSLKCIRDPALVHQRPAPPS | | |
| SG3-SLQ | | TVTTAGVTPQPESLSPSGKEPAASSPSSNNTAA | | |
| (SEQ ID | | TTAAIVPGSQLMPSKSPSTGTTEISSHESSHGTP | | |
| NO: 2730))- | | SQTTAKNWELTASASHQPPGVYPQGHSDTTV | | |
| HA Tag- | | AISTSTVLLCGLSAVSLLACYLKSRQTPPLASV | | |
| IL15Ra- | | EMEAMEALPVTWGTSSRDEDLENCSHHLGSG | | |
| Linker | | VGSLNCIVAVSQNMGVGKNGDLPWPPLRNEF | | |
| (GSG)- | | RYFQRMTTTSSVEGKQNLVIMGKKTWFSIPE | | |
| hDHFR(Amino | | KNRPLKGRINLVLSRELKEPPQGAHFLSRSLD | | |
| acid 2- | | DALKLTEQPELANKVDMVWIVGGSSVYKEA | | |
| 187 of WT; | | MNHPGHLKLFVTRIMQDFESDTFFPEIDLEKY | | |
| I17V)- | | KLLPEYPGVLSDVQEEKGIKYKFEVYEKND* | | |
| stop) | | | | |
| OT-IL15- | EF1a | MDWTWILFLVAAATRVHSDYKDDDDKNWV | 2923 | 5589 |
| 118 (IgE | | NVISDLKKIEDLIQSMHIDATLYTESDVHPSCK | | |
| leader- | | VTAMKCFLLELQVISLESGDASIHDTVENLIIL | | |
| FLAG- | | ANNSLSSNGNVTESGCKECEELEEKNIKEFLQ | | |
| IL15- | | SFVHIVQMFINTSSGGGSGGGGSGGGGSGGG | | |
| Linker | | GSGGGSLQYPYDVPDYAITCPPPMSVEHADI | | |
| (SG3- | | WVKSYSLYSRERYICNSGFKRKAGTSSLTECV | | |
| (SG4)3- | | LNKATNVAHWTTPSLKCIRDPALVHQRPAPPS | | |
| SG3-SLQ | | TVTTAGVTPQPESLSPSGKEPAASSPSSNNTAA | | |
| (SEQ ID | | TTAAIVPGSQLMPSKSPSTGTTEISSHESSHGTP | | |
| NO: 2730))- | | SQTTAKNWELTASASHQPPGVYPQGHSDTTV | | |
| HA Tag- | | AISTSTVLLCGLSAVSLLACYLKSRQTPPLASV | | |
| IL15Ra- | | EMEAMEALPVTWGTSSRDEDLENCSHHLGSG | | |
| Linker | | VGSLNCIVAVSQNMGIGKNGDLPWPPLRNEF | | |
| (GSG)- | | RYFQRMTTTSSVEGKQNLVIMGKKTWFSIPE | | |
| hDHFR | | KNRPLKGRINLVLSRELKEPPQGAHFLSRSLD | | |
| (Amino acid | | DALKLTEQPELANKVDMVWIVGGSSVYKEA | | |
| 2-187 of | | MYHPGHLKLFVTRIMQDFESDTFFPEIDLEKY | | |
| WT, | | KLLPEYPGVLSDVQEEKGIKYKFEVYEKND* | | |
| N127Y)- | | | | |
| stop) | | | | |
| OT-IL15- | EF1a | MDWTWILFLVAAATRVHSDYKDDDDKNWV | 2924 | 5590 |
| 119 (IgE | | NVISDLKKIEDLIQSMHIDATLYTESDVHPSCK | | |
| leader- | | VTAMKCFLLELQVISLESGDASIHDTVENLIIL | | |
| FLAG- | | ANNSLSSNGNVTESGCKECEELEEKNIKEFLQ | | |
| IL15- | | SFVHIVQMFINTSSGGGSGGGGSGGGGSGGG | | |
| Linker | | GSGGGSLQYPYDVPDYAITCPPPMSVEHADI | | |
| (SG3- | | WVKSYSLYSRERYICNSGFKRKAGTSSLTECV | | |
| (SG4)3- | | LNKATNVAHWTTPSLKCIRDPALVHQRPAPPS | | |
| SG3-SLQ | | TVTTAGVTPQPESLSPSGKEPAASSPSSNNTAA | | |
| (SEQ ID | | TTAAIVPGSQLMPSKSPSTGTTEISSHESSHGTP | | |
| NO: 2730))- | | SQTTAKNWELTASASHQPPGVYPQGHSDTTV | | |
| HA Tag- | | AISTSTVLLCGLSAVSLLACYLKSRQTPPLASV | | |
| IL15Ra- | | EMEAMEALPVTWGTSSRDEDLENCSHHLGSG | | |
| Linker | | VGSLNCIVAVSQNMGVGKNGDLPWPPLRNEF | | |
| (GSG)- | | RYFQRMTTTSSVEGKQNLVIMGKKTWFSIPE | | |
| hDHFR | | KNRPLKGRINLVLSRELKEPPQGAHFLSRSLD | | |
| (Amino acid | | DALKLTEQPELANKVDMVWIVGGSSVIKEAM | | |
| 2-187 of | | NHPGHLKLFVTRIMQDFESDTFFPEIDLEKYK | | |
| WT, I17V, | | LLPEYPGVLSDVQEEKGIKYKFEVYEKND* | | |
| Y122I)- | | | | |
| stop) | | | | |
| OT-IL15- | EF1a | MDWTWILFLVAAATRVHSNWVNVISDLKKIE | 2925 | 5591 |
| 128 (IgE | | DLIQSMHIDATLYTESDVHPSCKVTAMKCFLL | | |
| leader-IL15- | | ELQVISLESGDASIHDTVENLIILANNSLSSNG | | |
| Linker | | NVTESGCKECEELEEKNIKEFLQSFVHIVQMFI | | |
| (SG3- | | NTSSGGGSGGGGSGGGGSGGGGSGGGSLQIT | | |
| (SG4)3- | | CPPPMSVEHADIWVKSYSLYSRERYICNSGFK | | |
| SG3-SLQ | | RKAGTSSLTECVLNKATNVAHWTTPSLKCIR | | |
| (SEQ ID | | DPALVHQRPAPPSTVTTAGVTPQPESLSPSGK | | |
| NO: 2730))- | | EPAASSPSSNNTAATTAAIVPGSQLMPSKSPST | | |
| IL15Ra- | | GTTEISSHESSHGTPSQTTAKNWELTASASHQ | | |
| Spacer- | | PPGVYPQGHSDTTVAISTSTVLLCGLSAVSLL | | |
| Flagx3- | | ACYLKSRQTPPLASVEMEAMEALPVTWGTSS | | |
| Spacer- | | RDEDLENCSHHLSRMDYKDDDDKDYKDDDD | | |
| BamHI (GS)- | | KDYKDDDDKSRGSGATNFSLLKQAGDVEENP | | |
| P2A | | GPLSKGEEDNMAIIKEFMRFKVHMEGSVNGH | | |
| cleavable | | EFEIEGEGEGRPYEGTQTAKLKVTKGGPLPFA | | |
| peptide- | | WDILSPQFMYGSKAYVKHPADIPDYLKLSFPE | | |
| mCherry | | GFKWERVMNFEDGGVVTVTQDSSLQDGEFIY | | |
| (M1L)- | | KVKLRGTNFPSDGPVMQKKTMGWEASSERM | | |
| stop) | | YPEDGALKGEIKQRLKLKDGGHYDAEVKTTY | | |
| | | KAKKPVQLPGAYNVNIKLDITSHNEDYTIVEQ | | |
| | | YERAEGRHSTGGMDELYK* | | |
| OT-IL15- | EF1a | MDWTWILFLVAAATRVHSNWVNVISDLKKIE | 2926 | 5592 |
| 129 (IgE | | DLIQSMHIDATLYTESDVHPSCKVTAMKCFLL | | |
| leader-IL15- | | ELQVISLESGDASIHDTVENLIILANNSLSSNG | | |
| Linker | | NVTESGCKECEELEEKNIKEFLQSFVHIVQMFI | | |
| (SG3- | | NTSSGGGSGGGGSGGGGSGGGGSGGGSLQIT | | |
| (SG4)3- | | CPPPMSVEHADIWVKSYSLYSRERYICNSGFK | | |
| SG3-SLQ | | RKAGTSSLTECVLNKATNVAHWTTPSLKCIR | | |
| (SEQ ID | | DPALVHQRPAPPSTVTTAGVTPQPESLSPSGK | | |
| NO: 2730))- | | EPAASSPSSNNTAATTAAIVPGSQLMPSKSPST | | |
| IL15Ra- | | GTTEISSHESSHGTPSQTTAKNWELTASASHQ | | |
| BamHI (GS)- | | PPGVYPQGHSDTTVAISTSTVLLCGLSAVSLL | | |
| P2A | | ACYLKSRQTPPLASVEMEAMEALPVTWGTSS | | |
| cleavable | | RDEDLENCSHHLGSGATNFSLLKQAGDVEEN | | |
| peptide | | PGPLSKGEEDNMAIIKEFMRFKVHMEGSVNG | | |
| mCherry | | HEFEIEGEGEGRPYEGTQTAKLKVTKGGPLPF | | |
| (M1L)-stop) | | AWDILSPQFMYGSKAYVKHPADIPDYLKLSFP | | |
| | | EGFKWERVMNFEDGGVVTVTQDSSLQDGEFI | | |
| | | YKVKLRGTNFPSDGPVMQKKTMGWEASSER | | |
| | | MYPEDGALKGEIKQRLKLKDGGHYDAEVKT | | |
| | | TYKAKKPVQLPGAYNVNIKLDITSHNEDYTIV | | |
| | | EQYERAEGRHSTGGMDELYK* | | |

TABLE 33
IL15/IL15Ra constructs

| | | | | Amino | |
|---|---|---|---|---|---|
| | | | | Acid | Nucleic Acid |
| Construct | Sequence | | | SEQ ID | SEQ ID NO/ |
| Description | Description | Promoter | Amino acid sequences | NO | Sequence |
| OT-IL15- | Full | EF1a | MDWTWILFLVAAATRVHSN | 2927- | 5593 |
| 122 (IgE | construct | | WVNVISDLKKIEDLIQSMHID | 2942 | |
| leader- | | | ATLYTESDVHPSCKVTAMKC | | |
| IL15- | | | FLLELQVISLESGDASIHDTVE | | |
| linker (GS)- | | | NLIILANNSLSSNGNVTESGC | | |
| hDHFR | | | KECEELEEKNIKEFLQSFVHIV | | |
| (Amino acid | | | QMFINTSGSVGSLNCIVAVSQ | | |
| 2-187 of | | | NMGIGKNGDLPWPPLRNEFR | | |
| WT, Y122I)- | | | YFQRMTTTSSVEGKQNLVIM | | |
| stop- | | | GKKTWFSIPEKNRPLKGRINL | | |
| spacer- | | | VLSRELKEPPQGAHFLSRSLD | | |
| IRES- | | | DALKLTEQPELANKVDMVWI | | |
| spacer- | | | VGGSSVIKEAMNHPGHLKLF | | |
| mCherry- | | | VTRIMQDFESDTFFPEIDLEKY | | |
| stop) | | | KLLPEYPGVLSDVQEEKGIKY | | |
| | | | KFEVYEKND*SR*YDSLEIPPL | | |
| | | | SLPPP*RYWPKPLGIRPVCVC | | |
| | | | LYVIFHHIAVFWQCEGPETWP | | |
| | | | CLLDEHS*GSFPSRQRNARSV | | |
| | | | ECREGSSSSGSFLKTNNVCSD | | |
| | | | PLQAAEPPTWRQVPLRPKAT | | |
| | | | CIRYTCKGGTTPVPRCELDSC | | |
| | | | GKSQMALLKRIQQGAEGCPE | | |
| | | | GTPLYGI*SGASVHMLYMCL | | |
| | | | VEVKKTSRPPEPRGRGFPLKN | | |
| | | | TMIIWPQP**ARARRITWPSSR | | |
| | | | SSCASRCTWRAP*TATSSRSR | | |
| | | | ARARAAPTRAPRPPS*R*PRV | | |
| | | | APCPSPGTSCPLSSCTAPRPT* | | |
| | | | STPPTSPTT*SCPSPRASSGSA* | | |
| | | | *TSRTAAW*P*PRTPPCRTASS | | |
| | | | STR*SCAAPTSPPTAP*CRRRP | | |
| | | | WAGRPPPSGCTPRTAP*RARS | | |
| | | | SRG*S*RTAATTTLRSRPPTRP | | |
| | | | RSPCSCPAPTTSTSSWTSPPTT | | |
| | | | RTTPSWNSTNAPRAATPPAA | | |
| | | | WTSCTS | | |
| | IgE leader- | — | MDWTWILFLVAAATRVHSN | 2943 | 5594 |
| | IL15- | | WVNVISDLKKIEDLIQSMHID | | |
| | linker(GS)- | | ATLYTESDVHPSCKVTAMKC | | |
| | hDHFR | | FLLELQVISLESGDASIHDTVE | | |
| | (Amino acid | | NLIILANNSLSSNGNVTESGC | | |
| | 2-187 of | | KECEELEEKNIKEFLQSFVHIV | | |
| | WT, Y122I)- | | QMFINTSGSVGSLNCIVAVSQ | | |
| | stop | | NMGIGKNGDLPWPPLRNEFR | | |
| | | | YFQRMTTTSSVEGKQNLVIM | | |
| | | | GKKTWFSIPEKNRPLKGRINL | | |
| | | | VLSRELKEPPQGAHFLSRSLD | | |
| | | | DALKLTEQPELANKVDMVWI | | |
| | | | VGGSSVIKEAMNHPGHLKLF | | |
| | | | VTRIMQDFESDTFFPEIDLEKY | | |
| | | | KLLPEYPGVLSDVQEEKGIKY | | |
| | | | KFEVYEKND* | | |
| | mCherry- | — | MSKGEEDNMAIIKEFMRFKV | 2944 | 5595 |
| | stop | | HMEGSVNGHEFEIEGEGEGRP | | |
| | | | YEGTQTAKLKVTKGGPLPFA | | |
| | | | WDILSPQFMYGSKAYVKHPA | | |
| | | | DIPDYLKLSFPEGFKWERVM | | |
| | | | NFEDGGVVTVTQDSSLQDGE | | |
| | | | FIYKVKLRGTNFPSDGPVMQ | | |
| | | | KKTMGWEASSERMYPEDGA | | |
| | | | LKGEIKQRLKLKDGGHYDAE | | |
| | | | VKTTYKAKKPVQLPGAYNV | | |
| | | | NIKLDITSHNEDYTIVEQYER | | |
| | | | AEGRHSTGGMDELYK* | | |
| OT-IL15- | Full | EF1a | MDWTWILFLVAAATRVHSN | 2945- | 5596 |
| 123 and OT- | construct | | WVNVISDLKKIEDLIQSMHID | 2954 | |
| IL15- | | | ATLYTESDVHPSCKVTAMKC | | |
| 127(IgE | | | FLLELQVISLESGDASIHDTVE | | |
| leader- | | | NLIILANNSLSSNGNVTESGC | | |
| IL15- | | | KECEELEEKNIKEFLQSFVHIV | | |
| BamHI (GS)- | | | QMFINTSGS*NLDNTTH*RSR | | |
| stop- | | | PSPSPPPNVTGRSRLE*GRCAF | | |
| spacer- | | | VYMLFSTILPSFGNVRARKPG | | |
| IRES- | | | PVFLTSIPRGLSPLAKGMQGL | | |
| spacer- | | | LNVVKEAVPLEAS*RQTTSVA | | |
| mCherry- | | | TLCRQRNPPPGDRCLCGQKP | | |
| stop) | | | RV*DTPAKAAQPQCHVVSWI | | |
| | | | VVERVKWLSSSVFNKGLKDA | | |
| | | | QKVPHCMGSDLGPRCTCFTC | | |
| | | | V*SRLKKRLGPPNHGDVVFL* | | |
| | | | KTR**YGHNHDEQGRGG*HG | | |
| | | | HHQGVHALQGAHGGLRERP | | |
| | | | RVRDRGRGRGPPLRGHPDRQ | | |
| | | | AEGDQGWPPALRLGHPVPSV | | |
| | | | HVRLQGLREAPRRHPRLLEA | | |
| | | | VLPRGLQVGARDELRGRRRG | | |
| | | | DRDPGLLPAGRRVHLQGEAA | | |
| | | | RHQLPLRRPRNAEEDHGLGG | | |
| | | | LLRADVPRGRRPEGRDQAEA | | |
| | | | EAEGRRPLRR*GQDHLQGQE | | |
| | | | ARAAARRLQRQHQVGHHLP | | |
| | | | QRGLHHRGTVRTRRGPPLHR | | |
| | | | RHGRAVQV | | |
| | IgE leader- | — | MDWTWILFLVAAATRVHSN | 2955 | 5597 |
| | IL15- | | WVNVISDLKKIEDLIQSMHID | | |
| | BamHI (GS)- | | ATLYTESDVHPSCKVTAMKC | | |
| | stop | | FLLELQVISLESGDASIHDTVE | | |
| | | | NLIILANNSLSSNGNVTESGC | | |
| | | | KECEELEEKNIKEFLQSFVHIV | | |
| | | | QMFINTSGS* | | |
| | mCherry- | — | MSKGEEDNMAIIKEFMRFKV | 2944 | 5595 |
| | stop | | HMEGSVNGHEFEIEGEGEGRP | | |
| | | | YEGTQTAKLKVTKGGPLPFA | | |
| | | | WDILSPQFMYGSKAYVKHPA | | |
| | | | DIPDYLKLSFPEGFKWERVM | | |
| | | | NFEDGGVVTVTQDSSLQDGE | | |
| | | | FIYKVKLRGTNFPSDGPVMQ | | |
| | | | KKTMGWEASSERMYPEDGA | | |
| | | | LKGEIKQRLKLKDGGHYDAE | | |
| | | | VKTTYKAKKPVQLPGAYNV | | |
| | | | NIKLDITSHNEDYTIVEQYER | | |
| | | | AEGRHSTGGMDELYK* | | |

[0622] In some aspects, the DD-IL15/IL15Ra comprises the amino acid sequences provided herein with any combination of components in any order. IL15Ra may be fused to DD by the amino acid sequence SG. Examples of DD-IL15/IL15Ra are provided throughout. In some aspects, the DD-IL115/IL15Ra comprises the amino acid sequences provided in Table 6a, 6b, and 6c. The amino acid sequences in Tables 6a, 6b and 6c may comprise a stop codon which is denoted in the table with a “*” at the end of the amino acid sequence.

[0623] In one embodiment, the payload of the present invention may comprise IL18. IL18 is a proinflammatory and immune regulatory cytokine that promotes IFN-γ production by T and NK cells. IL18 belongs to the IL1 family. Secreted IL18 binds to a heterodimer receptor complex, consisting of IL18Rα and β-chains and initiates signal transduction. IL18 acts in concert with other cytokines to modulate immune system functions, including induction of IFN-γ production, Th1 responses, and NK cell activation in response to pathogen products. IL18 showed anti-cancer effects in several tumors. Administration of recombinant IL18 protein or IL18 transgene induces melanoma or sarcoma regression through the activation of CD4⁺ T and/or NK cell-mediated responses (reviewed by Srivastava et al., Curr. Med. Chem., 2010, 17: 3353-3357). The combination of IL18 with other cytokines, such as IL12 or co-stimulatory molecules (e.g., CD80) increases IL18 anti-tumor effects. For example, IL18 and IL12A/B or CD80 genes have been integrated successfully in the genome of oncolytic viruses, with the aim to trigger synergistically T cell-mediated anti-tumor immune responses (Choi et al., Gene Ther., 2011, 18: 898-909). IL2/IL18 fusion proteins also display enhanced anti-tumor properties relative to either cytokine alone and low toxicity in preclinical models (Acres et al., Cancer Res., 2005, 65:9536-9546).

[0624] IL18 alone, or in combination of IL12 and IL15, activates NK cells. Preclinical studies have demonstrated that adoptively transferred IL12, IL15 and IL18 pre-activated NK cells display enhanced effector function against established tumors in vivo (Ni et al., J Exp Med. 2012, 209: 2351-2365; and Romee et al., Blood. 2012,120:4751-4760). Human IL12/IL15/IL18 activated NK cells also display memory-like features and secrete more IFN-γ in response to cytokines (e.g., low concentration of IL2). In one embodiment, the effector module of the present invention may be a DD-IL18 fusion polypeptide.

[0625] In one embodiment, the payload of the present invention may comprise IL21. IL21 is another pleiotropic type I cytokine that is produced mainly by T cells and natural killer T (NKT) cells. IL21 has diverse effects on a variety of cell types including but not limited to CD4+ and CD8⁺ T cells, B cells, macrophages, monocytes, and dendritic cells (DCs). The functional receptor for IL21 is composed of IL21 receptor (IL21R) and the common cytokine receptor gamma chain, which is also a subunit of the receptors for IL2, IL4, IL7, IL9 and IL15. Studies provide compelling evidence that IL21 is a promising immunotherapeutic agent for cancer immunotherapy. IL21 promotes maturation, enhances cytotoxicity, and induces production of IFN-γ and perforin by NK cells. These effector functions inhibit the growth of B16 melanoma (Kasaian et al., Immunity. 2002, 16(4):559-569; and Brady et al., J Immunol. 2004, 172(4):2048-2058). IL21 together with IL15 expands antigen-specific CD8+ T-cell numbers and their effector function, resulting in tumor regression (Zeng et al., J Exp Med. 2005, 201(1):139-148). IL21 may also be used to rejuvenate multiple immune effector cells in the tumor microenvironment. IL21 may also directly induce apoptosis in certain types of lymphoma such as diffuse large B-cell lymphoma, mantle cell lymphoma, and chronic lymphocytic leukemia cells, via activation of STAT3 or STAT1 signal pathway. IL21, alone or in combination with anti-CD20 mAb (rituximab) can activate NK cell-dependent cytotoxic effects. Interestingly, discovery of the immunosuppressive actions of IL21 suggests that this cytokine is a “double-edged sword”—IL21 stimulation may lead to either the induction or suppression of immune responses. Both stimulatory and suppressive effects of IL21 must be considered when using IL21-related immunotherapeutic agents. The level of IL21 needs to be tightly controlled by regulatory elements. In one aspect, the effector module of the present invention may be a DD-IL21 fusion polypeptide.

[0626] In some embodiments, payloads of the present invention may comprise type I interferons. Type I interferons (IFNs-I) are soluble proteins important for fighting viral infection in humans. IFNs-I include IFN-alpha subtypes (IFN-α1, IFN-α1b, IFN-α1c), IFN-beta, IFN-delta subtypes (IFN-delta 1, IFN-delta 2, IFN-delta 8), IFN-gamma, IFN-kappa, and IFN-epsilon, IFN-lambda, IFN-omega, IFN-tau and IFN-zeta. IFN-α and IFN-β are the main IFN-I subtypes in immune responses. All subtypes of IFN-I signal through a unique heterodimeric receptor, interferon alpha receptor (IFNAR), composed of 2 subunits, IFNAR1 and IFNAR2. IFNR activation regulates the host response to viral infections and in adaptive immunity. Several signaling cascades can be activated by IFNR, including the Janus activated kinase-signal transducer and activation of transcription (JAK-STAT) pathway, the mitogen activated protein kinase (MAPK) pathway, the phosphoinositide 3-kinase (PI3K) pathway, the v-crk sarcoma virus CT10 oncogene homolog (avian)-like (CRKL) pathway, and NF-κB cascade. It has long been established that type I IFNs directly inhibit the proliferation of tumor cells and virus-infected cells, and increase MHC class I expression, enhancing antigen recognition. IFNs-I have also proven to be involved in immune system regulation. IFNs can either directly, through interferon receptor (IFNR), or indirectly by the induction of chemokines and cytokines, regulate the immune system. Type I IFNs enhance NK cell functions and promote survival of NK cells. Type I IFNs also affect monocytes, supporting the differentiation of monocytes into DC with high capacity for antigen presentation, and stimulate macrophage function and differentiation. Several studies also demonstrate that IFNs-I promote CD8⁺ T cell survival and functions. In some instances, it may be desirable to tune the expression of Type I IFNs using biocircuits of the present invention to avoid immunosuppression caused by long-term treatment with IFNs.

[0627] New anticancer immunotherapies are being developed that use recombinant type I IFN proteins, type I IFN transgene, type I IFN-encoding vectors and type I IFN-expressing cells. For example, IFN-α has received approval for treatment of several neoplastic diseases, such as melanoma, RCC and multiple myeloma. Though type I IFNs are powerful tools to directly and indirectly modulate the functions of the immune system, side effects of systemic long-term treatments and lack of sufficiently high efficacy have dampened the interest of IFN-α for clinical use in oncology. It is believed that if IFN levels are tightly regulated at the malignant tissues, type I IFNs are likely more efficacious. Approaches for intermittent delivery are proposed according to the observation that intermittency at an optimized pace may help to avoid signaling desensitizing mechanisms (negative feedback mechanisms) induced by IFNs-I (i.e., because of SOCS1 induction) in the responding immune cells. In accordance with the present invention, the effector module may comprise a DD-IFN fusion polypeptide. The DD and its ligand control the expression of IFN to induce an antiviral and antitumor immune responses and in the meantime, to minimize the side effects caused by long-term exposure of IFN.

[0628] In some embodiments, payloads of the present invention may comprise members of tumor necrosis factor (TNF) superfamily. The term “TNF superfamily” as used herein refers to a group of cytokines that can induce apoptosis. Members of TNF family include TNF-alpha, TNF-beta (also known as lymphotoxin-alpha (LT-α)), lymphotoxin-beta (LT-0), CD40L(CD154), CD27L (CD70), CD30L(CD153), FASL(CD178), 4-1BBL (CD137L), OX40L, TRAIL (TNF-related apoptosis inducing ligand), APRIL (a proliferation-inducing ligand), TWEAK, TRANCE, TALL-1, GITRL, LIGHT and TNFSF1 to TNFSF20 (TNF ligand superfamily member 1 to 20). In one embodiment, the payload of the invention may be TNF-alpha. TNF-alpha can cause cytolysis of tumor cells, and induce cell proliferation differentiation as well. In one aspect, the effector module of the present invention may comprise a DD-TNF alpha fusion polypeptide.

[0629] In some embodiments, payloads of the present invention may comprise inhibitory molecules that block inhibitory cytokines. The inhibitors may be blocking antibodies specific to an inhibitory cytokine, and antagonists against an inhibitory cytokine, or the like.

[0630] In some aspects, payloads of the present invention may comprise an inhibitor of a secondary cytokine IL35. IL35 belongs to the interleukin-12 (IL12) cytokine family, and is a heterodimer composed of the IL27 β chain Ebi3 and the IL12 α chain p35. Secretion of bioactive IL35 has been described only in forkhead box protein 3 (Foxp3)⁺ regulatory T cells (Tregs) (resting and activated Tregs). Unlike other membranes in the family, IL35 appears to function solely in an anti-inflammatory fashion by inhibiting effector T cell proliferation and perhaps other parameters (Collison et al., Nature, 2007, 450(7169): 566-569).

[0631] In some embodiments, payloads of the present invention may comprise inhibitors that block the transforming growth factor beta (TGF-β) subtypes (TGF-β1, TGF-β2 and TGF-β3). TGF-β is secreted by many cell types, including macrophages and is often complexed with two proteins LTBP and LAP. Serum proteinases such as plasmin catalyze the release of active TGF-β from the complex from the activated macrophages. It has been shown that an increase in expression of TGF-β correlates with the malignancy of many cancers. The immunosuppressive activity of TGF-β in the tumor microenvironment contributes to oncogenesis.

[0632] In some embodiments, payloads of the present invention may comprise inhibitors of IDO enzyme.

[0633] In some embodiments, payloads of the present invention may comprise chemokines and chemokine receptors. Chemokines are a family of secreted small cytokines, or signaling proteins that can induce directed chemotaxis in nearby responsive cells. The chemokine may be a SCY (small cytokine) selected from the group consisting of SCYA1-28 (CCL1-28), SCYB1-16 (CXCL1-16), SCYC1-2 (XCL1-2), SCYD-1 and SCYE-1; or a C chemokine selected from XCL1 and XCL2; or a CC chemokine selected from CCL1, CCL2, CCL3, CCL4, CCL5, CCL6, CCL7, CCL8, CCL9, CCL10, CCL11, CCL12, CCL13, CCL14, CCL15, CCL16, CCL17, CCL18, CCL19, CCL20, CCL21, CCL22, CCL23, CCL24, CCL25, CCL26, CCL27 and CCL28; or a CXC chemokine selected from CXCL1, CXCL2, CXCL3, CXCL4, CXCL5, CXCL6, CXCL7, CXCL8, CXCL9, CXCL10, CXCL11, CXCL12, CXCL13, CXCL14, CXCL15, CXCL16 and CXCL17; or a CX3C chemokine CX3CL1. In some aspects, the chemokine receptor may be a receptor for the C chemokines including XCR1; or a receptor for the CC chemokines including CCR1, CCR2, CCR3, CCR4, CCR5, CCR6, CCR7, CCR8, CCR9 and CCR10; or a receptor for the CXC chemokines including CXCR1, CXCR2, CXCR3, CXCR4 and CXCR5; or a CX3C chemokine receptor CX3CR1.

[0634] In some embodiments, payloads of the present invention may comprise other immunomodulators that play a critical role in immunotherapy, such as GM-CSF (Granulocyte-macrophage colony stimulating factor), erythropoietin (EPO), MIP3a, monocyte chemotactic protein (MCP)-1, intracellular adhesion molecule (ICAM), macrophage colony stimulating factor (M-CSF), Interleukin-1 receptor activating kinase (iRAK-1), lactotransferrin, and granulocyte colony stimulating factor (G-CSF).

[0635] In some embodiments, the payload of the present invention may comprise Amphiregulin. Amphiregulin (AREG) is an EGF-like growth factor which binds to the EGFR receptor and enhances CD4+ regulatory T cells (Tregs) function. AREG promotes immune suppression in the tumor environment. Thus, in some embodiment, the payloads of the present invention may comprise Amhiregulin to dampen immune response during immunotherapy.

[0636] In some embodiments, payloads of the present invention may comprise fusion proteins wherein a cytokine, chemokine and/or other soluble factor may be fused to other biological molecules such as antibodies and or ligands for a receptor. Such fusion molecules may increase the half-life of the cytokines, reduce systemic toxicity, and increase local concentration of the cytokines at the tumor site. Fusion proteins containing two or more cytokines, chemokines and or other soluble factors may be utilized to obtain synergistic therapeutic benefits. In one embodiment, payload may be a GM-CSF/IL2 fusion protein.

[0637] In one embodiment, the payloads of the present invention may be cytokines fused to TNF alpha ectodomain. Such payloads are produced as membrane associated cytokines fused to the TNF ectodomain. In one embodiment, the cytokine may be shed from the cell surface by the action of membrane associated proteases, and/or proteases in the extracellular space e.g. MMP9. Any of the cytokines described herein may be useful in the present invention. Such cytokine-TNF scaffold constructs may be used to preserve the native sequence of the processed cytokine while preserving regulation.

[0638] In some embodiments, the present invention provides methods for tuning the expression and function of an immunotherapeutic agent by operably linking it to an SRE within the effector module. Tuning of the immunotherapeutic agent may be in vitro in cells or in vivo in a subject. In one embodiment, the immunotherapeutic agent is IL15. In another embodiment, the immunotherapeutic agent is a whole or a portion of IL15 fused to the whole or a portion of IL15Rα. In some embodiments, the SRE is a DD. The immunotherapeutic agent may be stabilized by the stabilization ratio of at least 1, such as by at least 1-10, 1-20, 1-30, 1-40, 1-50, 1-60, 1-70, 1-80, 1-90, 1-100, 20-30, 20-40, 20-50, 20-60, 20-70, 20-80, 20-90, 20-95, 20-100, 30-40, 30-50, 30-60, 30-70, 30-80, 30-90, 30-95, 30-100, 40-50, 40-60, 40-70, 40-80, 40-90, 40-95, 40-100, 50-60, 50-70, 50-80, 50-90, 50-95, 50-100, 60-70, 60-80, 60-90, 60-95, 60-100, 70-80, 70-90, 70-95, 70-100, 80-90, 80-95, 80-100, 90-95, 90-100 or 95-100. In some embodiments, the DD destabilizes the immunotherapeutic agent by a destabilization ratio of at least 0, such as by at least 0.1, 0.2, 0.3, 0.4, 0.5, 0.6, 0.7, 0.8, 0.9, or at least, 0-0.1, 0-0.2, 0-0.3, 0-0.4, 0-0.5, 0-0.6, 0-0.7, 0-0.8, 0-0.9, 0.1-0.2, 0.1-0.3, 0.1-0.4, 0.1-0.5, 0.1-0.6, 0.1-0.7, 0.1-0.8, 0.1-0.9, 0.2-0.3, 0.2-0.4, 0.2-0.5, 0.2-0.6, 0.2-0.7, 0.2-0.8, 0.2-0.9, 0.3-0.4, 0.3-0.5, 0.3-0.6, 0.3-0.7, 0.3-0.8, 0.3-0.9, 0.4-0.5, 0.4-0.6, 0.4-0.7, 0.4-0.8, 0.4-0.9, 0.5-0.6, 0.5-0.7, 0.5-0.8, 0.5-0.9, 0.6-0.7, 0.6-0.8, 0.6-0.9, 0.7-0.8, 0.7-0.9 or 0.8-0.9. As used herein, the term “tune” means to adjust, balance or adapt one thing in response to a stimulus or toward a particular outcome. In one non-limiting example, the SREs and/or DDs of the present invention adjust, balance or adapt the function or structure of compositions to which they are appended, attached or associated with in response to particular stimuli and/or environments. In some embodiments, the compositions of the present invention may be used to tune the expression or function of an immunotherapeutic to less than, or equal to or greater than the expression or function achieved by a constitutively expressed construct.

[0639] In some embodiments, the present invention provides methods for tuning the expression and function of an immunotherapeutic agent by operably linking it to an SRE within the effector module. Tuning of the immunotherapeutic agent may be in vitro in cells or in vivo in a subject. In one embodiment, the immunotherapeutic agent is IL12. In some embodiments, the SRE is a DD. The immunotherapeutic agent may be stabilized by the stabilization ratio of between 1 and 100. In some embodiments, the DD destabilizes the immunotherapeutic agent by a destabilization ratio of between 0 and 0.1. In one embodiment, the destabilization ration may be between 0 and 0.01. As used herein, the term “tune” means to adjust, balance or adapt one thing in response to a stimulus or toward a particular outcome. In one non-limiting example, the SREs and/or DDs of the present invention adjust, balance or adapt the function or structure of compositions to which they are appended, attached or associated with in response to particular stimuli and/or environments. In some embodiments, the compositions of the present invention may be used to tune the expression or function of the payload to match the expression of function achieved by a constitutively expressed construct.

[0640] In some embodiments, ligands that do not affect the activity of the immune cell, and/or the chimeric antigen receptor, in the absence of the SREs may be preferably selected.

[0641] In some embodiments, the IL12 levels secreted by the immune cells of the invention may approximately be comparable to the IL12 levels secreted by human myeloid dendritic cells (mDC1), when activated with TLR agonists. In one embodiment, the TLR agonist may be the combination of lipopolysaccharide administered with R848.

[0642] In some embodiments, the IFN gamma secreted by IL12 induced activation of the immune cells is at least 5 fold greater in the presence of ligand, compared to the levels in the absence of ligand.

[0643] In some embodiments, the IFN gamma secreted by IL15 induced activation of the immune cells is at least 10-fold greater in the presence of ligand, compared to the levels in the absence of ligand.

[0644] In some embodiments, regulation of IL12 provides the necessary safety switch. In some embodiments, IL12 secretion recruit and/or activates effector cells in the tumor microenvironment. In some embodiments, the IL12 regulation provides a benefit to CAR T function without causing toxicity.

[0645] In some embodiments, regulation of IL15-IL15Ra fusion proteins provides a safety switch as compared to constitutively expressed IL15-IL15Ra. In some embodiments, IL15-IL15Ra leads to better expansion, and/or persistence of CAR T cells.

[0646] In some embodiments, payloads of the invention may be cytokines, and fragments, variants, analogs and derivatives thereof, including but not limited to interleukins, tumor necrosis factors (TNFs), interferons (IFNs), TGF beta and chemokines.

[0647] In some embodiments, a cytokine may be an interleukin (IL) selected from IL1, IL1alpha (also called hematopoietin-1), IL1beta (catabolin), IL1 delta, IL1epsilon, IL1eta, IL1 zeta, interleukin-1 family member 1 to 11 (IL1F1 to IL1F11), interleukin-1 homolog 1 to 4 (IL1H1 to IL1H4), IL1 related protein 1 to 3 (IL1RP1 to IL1RP3), IL2, IL3, IL4, IL5, IL6, IL7, IL8, IL9, IL10, IL10C, IL10D, IL11, IL11a, IL1b, IL12, IL13, IL14, IL15, IL16, IL17, IL17A, 1117B, IL17C, IL17E, IL17F, 1118, IL19, IL20, IL20 like (IL20L), 1121, IL22, IL23, IL23A, IL23-p19, IL23-p40, IL24, Il25, IL26, IL27, IL28A, IL28B, IL29, IL30, IL31, IL32, IL33, IL34, IL35, IL36 alpha, IL36 beta, IL36 gamma, IL36RN, IL37, IL37a, IL37b, IL37c, IL37d, IL37e and IL38.

[0648] In certain embodiments, a cytokine may be a type I interferons (IFN) including IFN-alpha subtypes (IFN-α1, IFN-α1b, IFN-α1c), IFN-beta, IFN-delta subtypes (IFN-delta 1, IFN-delta 2, IFN-delta 8), IFN-gamma, IFN-kappa, and IFN-epsilon, IFN-lambda, IFN-omega, IFN-tau and IFN-zeta. In certain embodiments, a cytokine may be a member of tumor necrosis factor (TNF) superfamily, including TNF-alpha, TNF-beta (also known as lymphotoxin-alpha (LT-α)), lymphotoxin-beta (LT-0), CD40L(CD154), CD27L (CD70), CD30L(CD153), FASL(CD178), 4-1BBL (CD137L), OX40L, TRAIL (TNF-related apoptosis inducing ligand), APRIL (a proliferation-inducing ligand), TWEAK, TRANCE, TALL-1, GITRL, LIGHT and TNFSF1 to TNFSF20 (TNF ligand superfamily member 1 to 20).

[0649] In certain embodiments, a cytokine may be a chemokine selected from SCYA1-28 (CCL1-28), SCYB1-16 (CXCL1-16), SCYC1-2 (XCL1-2), SCYD-1, SCYE-1, XCL1, XCL2, CCL1, CCL2, CCL3, CCL4, CCL5, CCL6, CCL7, CCL8, CCL9, CCL10, CCL11, CCL12, CCL13, CCL14, CCL15, CCL16, CCL17, CCL18, CCL19, CCL20, CCL21, CCL22, CCL23, CCL24, CCL25, CCL26, CCL27, CCL28, CXCL1, CXCL2, CXCL3, CXCL4, CXCL5, CXCL6, CXCL7, CXCL8, CXCL9, CXCL10, CXCL11, CXCL12, CXCL13, CXCL14, CXCL15, CXCL16, CXCL17 and CX3CL1; or a chemokine receptor selected from XCR1, CCR1, CCR2, CCR3, CCR4, CCR5, CCR6, CCR7, CCR8, CCR9, CCR10, CXCR1, CXCR2, CXCR3, CXCR4, CXCR5 and CX3CR1.

[0650] In some embodiments, the payload of the present invention may be a cytokine fused to a cytokine receptor. In one embodiment, the payload may be IL15 fused to IL15 Receptor alpha subunit. A unique feature of IL15 mediated activation is the mechanism of trans-presentation in which IL15 is presented as a complex with the alpha subunit of IL15 receptor (IL15Rα) that binds to and activates membrane bound IL15 beta/gamma receptor, either on the same cell or a different cell. The IL15/IL15Ra complex is much more effective in activating IL15 signaling, than IL15 by itself. In one embodiment, the may be a IL15/IL15Ra fusion polypeptide described in US patent publication NO. US20160158285A1 (the contents of which are incorporated herein by reference in their entirety). The IL15 receptor alpha comprises an extracellular domain called the sushi domain that is considered to contain most of the structural elements necessary for binding to IL15. Thus, in some embodiments, the payload may be the IL15/IL15Ra sushi domain fusion polypeptide described in US Patent Publication NO. US20090238791A1 (the contents of which are incorporated herein by reference in their entirety). The effector modules containing IL15/IL15Rα, and/or DD-IL15/IL15Ra sushi domain may be designed to be secreted (using e.g. IL2 signal sequence) or membrane bound (using e.g. IgE or CD8a signal sequence).

[0651] In some aspects, the DD-IL115/IL15Ra comprises the amino acid sequences described in Table 37. Nucleic acid sequences encoding the amino acid sequences are also described in Table 37. In Table 37, the amino acid sequences may comprise a stop codon at the end which is denoted in the table with a “*”. The position of the mutated amino acids listed in Table 37 is relative to the wildtype human DHFR (Uniprot ID: P00374) of SEQ ID NO. 1.

TABLE 37
hDHFR-IL15/IL15Ra constructs

| | | Amino | Nucleic |
|---|---|---|---|
| | | Acid | Acid |
| | | SEQ ID | SEQ ID |
| Description | Amino acid sequences | NO | NO |
| IL2 signal | MYRMQLLSCIALSLALVTNS | 2956 | 5598- |
| sequence | | | 5601 |
| IgE leader | MDWTWILFLVAAATRVHS | 2957 | 5602 |
| sequence | | | |
| IL15 | NWVNVISDLKKIEDLIQSMHIDATLYTESDVHPSCKVTAMK | 2958 | 5603- |
| | CFLLELQVISLESGDASIHDTVENLIILANNSLSSNGNVTESGC | | 5606 |
| | KECEELEEKNIKEFLQSFVHIVQMFINTS* | | |
| IL15Ra | ITCPPPMSVEHADIWVKSYSLYSRERYICNSGFKRKAGTSSLT | 2959 | 7680 |
| | ECVLNKATNVAHWTTPSLKCIRDPALVHQRPAPPSTVTTAG | | |
| | VTPQPESLSPSGKEPAASSPSSNNTAATTAAIVPGSQLMPSKS | | |
| | PSTGTTEISSHESSHGTPSQTTAKNWELTASASHQPPGVYPQ | | |
| | GHSDTTVAISTSTVLLCGLSAVSLLACYLKSRQTPPLASVEM | | |
| | EAMEALPVTWGTSSRDEDLENCSHHL | | |
| Linker | SGGGSGGGGSGGGGSGGGGSGGGSLQ | 2960 | 5607 |
| hDHFR (Amino | VGSLNCIVAVSQNMGIGKNGDLPWPPLRNEFRYFQRMTTTS | 41 | 5608 |
| acid 2-187 of | SVEGKQNLVIMGKKTWFSIPEKNRPLKGRINLVLSRELKEPP | | |
| WT) (Y122I, | QGAHFLSRSLDDALKLTEQPELANKVDMVWIVGGSSVIKEF | | |
| A125F) | MNHPGHLKLFVTRIMQDFESDTFFPEIDLEKYKLLPEYPGVL | | |
| | SDVQEEKGIKYKFEVYEKND | | |
| hDHFR (Amino | VGSLNCIVAVSQNMGIGKNGDLPWPPLRNEFRYFFRMTTTS | 56 | 5609 |
| acid 2-187 of | SVEGKQNLVIMGKKTWFSIPEKFRPLKGRINLVLSRELKEPP | | |
| WT) (Q36F, | QGAHFLSRSLDDALKLTEQPELANKVDMVWIVGGSSVIKEA | | |
| N65F, Y122I) | MNHPGHLKLFVTRIMQDFESDTFFPEIDLEKYKLLPEYPGVL | | |
| | SDVQEEKGIKYKFEVYEKND | | |
| OT-IL15-008 | MDWTWILFLVAAATRVHSNWVNVISDLKKIEDLIQSMHIDA | 2961 | 5610 |
| (IgE signal | TLYTESDVHPSCKVTAMKCFLLELQVISLESGDASIHDTVEN | | |
| sequence; IL15; | LIILANNSLSSNGNVTESGCKECEELEEKNIKEFLQSFVHIVQ | | |
| linker (SG3- | MFINTSSGGGSGGGGSGGGGSGGGGSGGGSLQITCPPPMSVE | | |
| (SG4)3-SG3- | HADIWVKSYSLYSRERYICNSGFKRKAGTSSLTECVLNKAT | | |
| SLQ (SEQ ID | NVAHWTTPSLKCIRDPALVHQRPAPPSTVTTAGVTPQPESLS | | |
| NO: 2730)); | PSGKEPAASSPSSNNTAATTAAIVPGSQLMPSKSPSTGTTEISS | | |
| IL15Ra; stop) | HESSHGTPSQTTAKNWELTASASHQPPGVYPQGHSDTTVAIS | | |
| | TSTVLLCGLSAVSLLACYLKSRQTPPLASVEMEAMEALPVT | | |
| | WGTSSRDEDLENCSHHL* | | |
| OT-IL15-010 | MDWTWILFLVAAATRVHSNWVNVISDLKKIEDLIQSMHIDA | 2217 | 5611 |
| (IgE signal | TLYTESDVHPSCKVTAMKCFLLELQVISLESGDASIHDTVEN | | |
| sequence; IL15; | LIILANNSLSSNGNVTESGCKECEELEEKNIKEFLQSFVHIVQ | | |
| linker (SG3- | MFINTSSGGGSGGGGSGGGGSGGGGSGGGSLQITCPPPMSVE | | |
| (SG4)3-SG3- | HADIWVKSYSLYSRERYICNSGFKRKAGTSSLTECVLNKAT | | |
| SLQ (SEQ ID | NVAHWTTPSLKCIRDPALVHQRPAPPSTVTTAGVTPQPESLS | | |
| NO: 2730)); | PSGKEPAASSPSSNNTAATTAAIVPGSQLMPSKSPSTGTTEISS | | |
| IL15Ra; linker | HESSHGTPSQTTAKNWELTASASHQPPGVYPQGHSDTTVAIS | | |
| (SG); hDHFR | TSTVLLCGLSAVSLLACYLKSRQTPPLASVEMEAMEALPVT | | |
| (Amino acid 2- | WGTSSRDEDLENCSHHLSGVGSLNCIVAVSQNMGIGKNGDL | | |
| 187 of WT) | PWPPLRNEFRYFQRMTTTSSVEGKQNLVIMGKKTWFSIPEK | | |
| (Y122I, A125F); | NRPLKGRINLVLSRELKEPPQGAHFLSRSLDDALKLTEQPEL | | |
| stop) | ANKVDMVWIVGGSSVIKEFMNHPGHLKLFVTRIMQDFESDT | | |
| | FFPEIDLEKYKLLPEYPGVLSDVQEEKGIKYKFEVYEKND* | | |
| OT-IL15-011 | MDWTWILFLVAAATRVHSNWVNVISDLKKIEDLIQSMHIDA | 2218 | 5612 |
| (IgE signal | TLYTESDVHPSCKVTAMKCFLLELQVISLESGDASIHDTVEN | | |
| sequence; IL15; | LIILANNSLSSNGNVTESGCKECEELEEKNIKEFLQSFVHIVQ | | |
| linker (SG3- | MFINTSSGGGSGGGGSGGGGSGGGGSGGGSLQITCPPPMSVE | | |
| (SG4)3-SG3- | HADIWVKSYSLYSRERYICNSGFKRKAGTSSLTECVLNKAT | | |
| SLQ (SEQ ID | NVAHWTTPSLKCIRDPALVHQRPAPPSTVTTAGVTPQPESLS | | |
| NO: 2730)); | PSGKEPAASSPSSNNTAATTAAIVPGSQLMPSKSPSTGTTEISS | | |
| IL15Ra; linker | HESSHGTPSQTTAKNWELTASASHQPPGVYPQGHSDTTVAIS | | |
| (SG); hDHFR | TSTVLLCGLSAVSLLACYLKSRQTPPLASVEMEAMEALPVT | | |
| (Amino acid 2- | WGTSSRDEDLENCSHHLSGVGSLNCIVAVSQNMGIGKNGDL | | |
| 187 of WT) | PWPPLRNEFRYFFRMTTTSSVEGKQNLVIMGKKTWFSIPEKF | | |
| (Q36F, N65F, | RPLKGRINLVLSRELKEPPQGAHFLSRSLDDALKLTEQPELA | | |
| Y122I); stop) | NKVDMVWIVGGSSVIKEAMNHPGHLKLFVTRIMQDFESDTF | | |
| | FPEIDLEKYKLLPEYPGVLSDVQEEKGIKYKFEVYEKND* | | |

[0652] In one aspect, the payload of the invention may be IL12 fusion. This regulatable DD-IL12 fusion polypeptide may be directly used as an immunotherapeutic agent or be transduced into an immune effector cell (T cells and TIL, cells) to generate modified T cells with greater in vivo expansion and survival capabilities for adoptive cell transfer. In some embodiments, the IL12 may be a Flexi IL12, wherein both p35 and p40 subunits, are encoded by a single cDNA that produces a single chain polypeptide. In some aspects, the human DHFR-IL12 comprises the amino acid sequences described in Table 38. Nucleic acid sequences encoding the amino acid sequences are also described in Table 38. In Table 38, the amino acid sequences may comprise a stop codon at the end which is denoted in the table with a “*”. The position of the mutated amino acids listed in Table 38 is relative to the wildtype human DHFR (Uniprot ID: P00374) of SEQ ID NO. 1.

TABLE 38
DD-IL12 constructs

| | | Amino Acid | Nucleic Acid |
|---|---|---|---|
| Description | Amino Acid Sequence | SEQ ID NO | SEQ ID NO |
| p40 signal | MCHQQLVISWFSLVFLASPLVA | 2219 | 5614-5622 |
| sequence | | | |
| Linker | GGGGSGGGGSGGGGS | 2962 | 5623-5628 |
| Modified Furin | ESRRVRRNKRSK | 2963 | 5629-5631 |
| p40 | IWELKKDVYVVELDWYPDAPGEMVVLTCDTPEEDGITW | 2964 | 5632-5641 |
| | TLDQSSEVLGSGKTLTIQVKEFGDAGQYTCHKGGEVLS | | |
| | HSLLLLHKKEDGIWSTDILKDQKEPKNKTFLRCEAKNY | | |
| | SGRFTCWWLTTISTDLTFSVKSSRGSSDPQGVTCGAAT | | |
| | LSAERVRGDNKEYEYSVECQEDSACPAAEESLPIEVMV | | |
| | DAVHKLKYENYTSSFFIRDIIKPDPPKNLQLKPLKNSR | | |
| | QVEVSWEYPDTWSTPHSYFSLTFCVQVQGKSKREKKDR | | |
| | VFTDKTSATVICRKNASISVRAQDRYYSSSWSEWASVP | | |
| | CS* | | |
| p35 | RNLPVATPDPGMFPCLHHSQNLLRAVSNMLQKARQTLE | 2965 | 5642 |
| | FYPCTSEEIDHEDITKDKTSTVEACLPLELTKNESCLN | | |
| | SRETSFITNGSCLASRKTSFMMALCLSSIYEDLKMYQV | | |
| | EFKTMNAKLLMDPKRQIFLDQNMLAVIDELMQALNFNS | | |
| | ETVPQKSSLEEPDFYKTKIKLCILLHAFRIRAVTIDRV | | |
| | MSYLNAS* | | |
| p35 (Amino acid | VATPDPGMFPCLHHSQNLLRAVSNMLQKARQTLEFYPC | 2966 | 5643 |
| 5-197 of SEQ ID | TSEEIDHEDITKDKTSTVEACLPLELTKNESCLNSRET | | |
| NO. 185) | SFITNGSCLASRKTSFMMALCLSSIYEDLKMYQVEFKT | | |
| | MNAKLLMDPKRQIFLDQNMLAVIDELMQALNFNSETVP | | |
| | QKSSLEEPDFYKTKIKLCILLHAFRIRAVTIDRVMSYL | | |
| | NAS* | | |
| hDHFR(Amino | VGSLNCIVAVSQNMGIGKNGDLPWPPLRNEFRYFFRMT | 57 | 5644 |
| acid 2-187 of WT) | TTSSVEGKQNLVIMGKKTWFSIPEKNRPLKGRINLVLS | | |
| (Q36F, Y122I, | RELKEPPQGAHFLSRSLDDALKLTEQPELANKVDMVWI | | |
| A125F) | VGGSSVIKEFMNHPGHLKLFVTRIMQDFESDTFFPEID | | |
| | LEKYKLLPEYPGVLSDVQEEKGIKYKFEVYEKND | | |
| OT-IL12-006 (p40 | MCHQQLVISWFSLVFLASPLVAIWELKKDVYVVELDWY | 2967 | 5645 |
| signal sequence; | PDAPGEMVVLTCDTPEEDGITWTLDQSSEVLGSGKTLT | | |
| p40; linker (G4S)3 | IQVKEFGDAGQYTCHKGGEVLSHSLLLLHKKEDGIWST | | |
| (SEQ ID NO: 2731); | DILKDQKEPKNKTFLRCEAKNYSGRFTCWWLTTISTDL | | |
| p35) | TFSVKSSRGSSDPQGVTCGAATLSAERVRGDNKEYEYS | | |
| | VECQEDSACPAAEESLPIEVMVDAVHKLKYENYTSSFF | | |
| | IRDIIKPDPPKNLQLKPLKNSRQVEVSWEYPDTWSTPH | | |
| | SYFSLTFCVQVQGKSKREKKDRVFTDKTSATVICRKNA | | |
| | SISVRAQDRYYSSSWSEWASVPCSGGGGSGGGGSGGGG | | |
| | SRNLPVATPDPGMFPCLHHSQNLLRAVSNMLQKARQTL | | |
| | EFYPCTSEEIDHEDITKDKTSTVEACLPLELTKNESCL | | |
| | NSRETSFITNGSCLASRKTSFMMALCLSSIYEDLKMYQ | | |
| | VEFKTMNAKLLMDPKRQIFLDQNMLAVIDELMQALNFN | | |
| | SETVPQKSSLEEPDFYKTKIKLCILLHAFRIRAVTIDR | | |
| | VMSYLNAS* | | |
| OT-IL12-008 (p40 | MCHQQLVISWFSLVFLASPLVAVGSLNCIVAVSQNMGI | 2968 | 5646 |
| signal sequence; | GKNGDLPWPPLRNEFRYFFRMTTTSSVEGKQNLVIMGK | | |
| DD-hDHFR | KTWFSIPEKNRPLKGRINLVLSRELKEPPQGAHFLSRS | | |
| (Amino acid 2-187 | LDDALKLTEQPELANKVDMVWIVGGSSVIKEFMNHPGH | | |
| of WT) (Q36F, | LKLFVTRIMQDFESDTFFPEIDLEKYKLLPEYPGVLSD | | |
| Y122I, A125F); | VQEEKGIKYKFEVYEKNDESRRVRRNKRSKIWELKKDV | | |
| furin site | YVVELDWYPDAPGEMVVLTCDTPEEDGITWTLDQSSEV | | |
| (ESRRVRRNKRSK | LGSGKTLTIQVKEFGDAGQYTCHKGGEVLSHSLLLLHK | | |
| (SEQ ID NO: 2734)); | KEDGIWSTDILKDQKEPKNKTFLRCEAKNYSGRFTCWW | | |
| p40; linker | LTTISTDLTFSVKSSRGSSDPQGVTCGAATLSAERVRG | | |
| (G4S)3 (SEQ ID | DNKEYEYSVECQEDSACPAAEESLPIEVMVDAVHKLKY | | |
| NO: 2731); p35) | ENYTSSFFIRDIIKPDPPKNLQLKPLKNSRQVEVSWEY | | |
| | PDTWSTPHSYFSLTFCVQVQGKSKREKKDRVFTDKTSA | | |
| | TVICRKNASISVRAQDRYYSSSWSEWASVPCSGGGGSG | | |
| | GGGSGGGGSRNLPVATPDPGMFPCLHHSQNLLRAVSNM | | |
| | LQKARQTLEFYPCTSEEIDHEDITKDKTSTVEACLPLE | | |
| | LTKNESCLNSRETSFITNGSCLASRKTSFMMALCLSSI | | |
| | YEDLKMYQVEFKTMNAKLLMDPKRQIFLDQNMLAVIDE | | |
| | LMQALNFNSETVPQKSSLEEPDFYKTKIKLCILLHAFR | | |
| | IRAVTIDRVMSYLNAS | | |

[0653] In some embodiments, payloads fused to the DDs of the invention may be an inhibitor of an immunosuppressive molecule such as TGF-beta and IDO.

### Safety Switch

[0654] In some embodiments, payloads of the present invention may comprise SRE regulated safety switches that can eliminate adoptively transferred cells in the case of severe toxicity, thereby mitigating the adverse effects of T cell therapy. Adoptively transferred T cells in immunotherapy may attack normal cells in response to normal tissue expression of TAA. Even on-tumor target activity of adoptively transferred T cells can result in toxicities such as tumor lysis syndrome, cytokine release syndrome and the related macrophage activation syndrome. Safety switches may be utilized to eliminate inappropriately activated adoptively transferred cells by induction of apoptosis or by immunosurveillance.

[0655] In some embodiments, payloads of the present invention may comprise inducible killer/suicide genes that acts as a safety switch. The killer/suicide gene when introduced into adoptively transferred immune cells, could control their alloreactivity. The killer/suicide gene may be an apoptotic gene (e.g., any Caspase gene) which allows conditional apoptosis of the transduced cells by administration of a non-therapeutic ligand of the SRE (e.g., DD).

[0656] In some embodiments, the payloads of the present invention may be Caspase 9. In some instances, Caspase 9 may be modified to have low basal expression and lacking the Caspase recruitment domain (CARD) (SEQ ID NO. 26 and SEQ ID NO. 28 of U.S. Pat. No. 9,434,935B2; the contents of which are incorporated by reference in their entirety).

[0657] In one embodiment, the payload of the present invention is a suicide gene system, iCasp9/Chemical induced dimerization (CID) system which consists of a polypeptide derived from the Caspase9 gene fused to a drug binding domain derived from the human FK506 protein. Administration of bioinert, small molecule AP1903 (rimiducid), induces cross linking of the drug binding domains and dimerization of the fusion protein and in turn the dimerization of Caspase 9. This results in the activation of downstream effector Caspase 3 and subsequent induction of cellular apoptosis (Straathof et al., Blood, 2005, 105: 4247-4254; incorporated herein by reference in its entirety). Preclinical trials using CART including an iCasp9 gene have shown effective elimination of CAR T cells in vivo in mouse models and demonstrate the potential efficacy of this approach. (Budde et al, Plos One, 2013, 8: e82742.10.1371; Hoyos et al., Leukemia, 2010; 24(6):1160-1170). In one embodiment, the payload of the invention may comprise Caspase 9. In one aspect, the effector module of the invention may be a DD-Caspase9 fusion polypeptide. The DD-Caspase 9 may comprise the amino acid sequences provided in Table 39. In Table 39, the amino acid sequences may comprise a stop codon at the 3′ end which is denoted in the table with a “*”. The DD-Caspase 9 may comprise the amino acid sequences provided in Table 40. The amino acid sequences in Table 40 may comprise a stop codon which is denoted in the table with a “*” at the end of the amino acid sequence

TABLE 39
DD-Caspase 9 constructs

| Description/ | | Amino Acid | Nucleic Acid |
|---|---|---|---|
| Construct ID | Amino acid sequence | SEQ ID NO. | SEQ ID NO. |
| Caspase 9 | MDEADRRLLRRCRLRLVEELQVDQLWDALLSRELFRPHMIED | 2969 | 5647 |
| | IQRAGSGSRRDQARQLIIDLETRGSQALPLFISCLEDTGQDM | | |
| | LASFLRTNRQAAKLSKPTLENLTPVVLRPEIRKPEVLRPETP | | |
| | RPVDIGSGGFGDVGALESLRGNADLAYILSMEPCGHCLIINN | | |
| | VNFCRESGLRTRTGSNIDCEKLRRRFSSLHFMVEVKGDLTAK | | |
| | KMVLALLELAQQDHGALDCCVVVILSHGCQASHLQFPGAVYG | | |
| | TDGCPVSVEKIVNIFNGTSCPSLGGKPKLFFIQACGGEQKDH | | |
| | GFEVASTSPEDESPGSNPEPDATPFQEGLRTFDQLDAISSLP | | |
| | TPSDIFVSYSTFPGFVSWRDPKSGSWYVETLDDIFEQWAHSE | | |
| | DLQSLLLRVANAVSVKGIYKQMPGCFNFLRKKLFFKTS* | | |
| Caspase 9 | DEADRRLLRRCRLRLVEELQVDQLWDALLSRELFRPHMIEDI | 2970 | 5648 |
| (amino acid 2- | QRAGSGSRRDQARQLIIDLETRGSQALPLFISCLEDTGQDML | | |
| 416 of SEQ ID | ASFLRTNRQAAKLSKPTLENLTPVVLRPEIRKPEVLRPETPR | | |
| NO. 412) | PVDIGSGGFGDVGALESLRGNADLAYILSMEPCGHCLIINNV | | |
| | NFCRESGLRTRTGSNIDCEKLRRRFSSLHFMVEVKGDLTAKK | | |
| | MVLALLELAQQDHGALDCCVVVILSHGCQASHLQFPGAVYGT | | |
| | DGCPVSVEKIVNIFNGTSCPSLGGKPKLFFIQACGGEQKDHG | | |
| | FEVASTSPEDESPGSNPEPDATPFQEGLRTFDQLDAISSLPT | | |
| | PSDIFVSYSTFPGFVSWRDPKSGSWYVETLDDIFEQWAHSED | | |
| | LQSLLLRVANAVSVKGIYKQMPGCFNFLRKKLFFKTS* | | |
| Linker | SGGGS | 2971 | 5649 |
| hDHFR | MVGSLNCIVAVSQNMGIGKNGDLPWPPLRNEFRYFQRMTTTS | 11 | 5650 |
| (Y122I) | SVEGKQNLVIMGKKTWFSIPEKNRPLKGRINLVLSRELKEPP | | |
| | QGAHFLSRSLDDALKLTEQPELANKVDMVWIVGGSSVIKEAM | | |
| | NHPGHLKLFVTRIMQDFESDTFFPEIDLEKYKLLPEYPGVLS | | |
| | DVQEEKGIKYKFEVYEKND | | |
| hDHFR | MVGSLNCIVAVSQNMGIGKNGDLPWPPLRNEFRYFQRMTTTS | 27 | 5651 |
| (V75F, Y122I) | SVEGKQNLVIMGKKTWFSIPEKNRPLKGRINLFLSRELKEPP | | |
| | QGAHFLSRSLDDALKLTEQPELANKVDMVWIVGGSSVIKEAM | | |
| | NHPGHLKLFVTRIMQDFESDTFFPEIDLEKYKLLPEYPGVLS | | |
| | DVQEEKGIKYKFEVYEKND | | |
| hDHFR | MVGSLNCIVAVSQNMGIGKNGDLPWPPLRNEFRYFQRMTTTS | 20 | 5652 |
| (L94A, T147A) | SVEGKQNLVIMGKKTWFSIPEKNRPLKGRINLVLSRELKEPP | | |
| | QGAHFLSRSADDALKLTEQPELANKVDMVWIVGGSSVYKEAM | | |
| | NHPGHLKLFVTRIMQDFESDAFFPEIDLEKYKLLPEYPGVLS | | |
| | DVQEEKGIKYKFEVYEKND | | |
| OT-CASP9-003 | MVGSLNCIVAVSQNMGIGKNGDLPWPPLRNEFRYFQRMTTTS | 2972 | 5653 |
| (hDHFR(Y122 | SVEGKQNLVIMGKKTWFSIPEKNRPLKGRINLVLSRELKEPP | | |
| I); linker | QGAHFLSRSLDDALKLTEQPELANKVDMVWIVGGSSVIKEAM | | |
| (SGGGS (SEQ | NHPGHLKLFVTRIMQDFESDTFFPEIDLEKYKLLPEYPGVLS | | |
| ID NO: 3089)); | DVQEEKGIKYKFEVYEKNDSGGGSDEADRRLLRRCRLRLVEE | | |
| Caspase 9; | LQVDQLWDALLSRELFRPHMIEDIQRAGSGSRRDQARQLIID | | |
| stop) | LETRGSQALPLFISCLEDTGQDMLASFLRTNRQAAKLSKPTL | | |
| | ENLTPVVLRPEIRKPEVLRPETPRPVDIGSGGFGDVGALESL | | |
| | RGNADLAYILSMEPCGHCLIINNVNFCRESGLRTRTGSNIDC | | |
| | EKLRRRFSSLHFMVEVKGDLTAKKMVLALLELAQQDHGALDC | | |
| | CVVVILSHGCQASHLQFPGAVYGTDGCPVSVEKIVNIFNGTS | | |
| | CPSLGGKPKLFFIQACGGEQKDHGFEVASTSPEDESPGSNPE | | |
| | PDATPFQEGLRTFDQLDAISSLPTPSDIFVSYSTFPGFVSWR | | |
| | DPKSGSWYVETLDDIFEQWAHSEDLQSLLLRVANAVSVKGIY | | |
| | KQMPGCFNFLRKKLFFKTS* | | |
| OT-CASP9- | MVGSLNCIVAVSQNMGIGKNGDLPWPPLRNEFRYFQRMTTTS | 2973 | 5654 |
| 004 (hDHFR | SVEGKQNLVIMGKKTWFSIPEKNRPLKGRINLFLSRELKEPP | | |
| (V75F, | QGAHFLSRSLDDALKLTEQPELANKVDMVWIVGGSSVIKEAM | | |
| Y122I); linker | NHPGHLKLFVTRIMQDFESDTFFPEIDLEKYKLLPEYPGVLS | | |
| (SGGGS (SEQ | DVQEEKGIKYKFEVYEKNDSGGGSDEADRRLLRRCRLRLVEE | | |
| ID NO: 3089)); | LQVDQLWDALLSRELFRPHMIEDIQRAGSGSRRDQARQLIID | | |
| Caspase 9; | LETRGSQALPLFISCLEDTGQDMLASFLRTNRQAAKLSKPTL | | |
| stop) | ENLTPVVLRPEIRKPEVLRPETPRPVDIGSGGFGDVGALESL | | |
| | RGNADLAYILSMEPCGHCLIINNVNFCRESGLRTRTGSNIDC | | |
| | EKLRRRFSSLHFMVEVKGDLTAKKMVLALLELAQQDHGALDC | | |
| | CVVVILSHGCQASHLQFPGAVYGTDGCPVSVEKIVNIFNGTS | | |
| | CPSLGGKPKLFFIQACGGEQKDHGFEVASTSPEDESPGSNPE | | |
| | PDATPFQEGLRTFDQLDAISSLPTPSDIFVSYSTFPGFVSWR | | |
| | DPKSGSWYVETLDDIFEQWAHSEDLQSLLLRVANAVSVKGIY | | |
| | KQMPGCFNFLRKKLFFKTS* | | |
| OT-CASP9- | MVGSLNCIVAVSQNMGIGKNGDLPWPPLRNEFRYFQRMTTTS | 2974 | 5655 |
| 005 (hDHFR | SVEGKQNLVIMGKKTWFSIPEKNRPLKGRINLVLSRELKEPP | | |
| (L94A, | QGAHFLSRSADDALKLTEQPELANKVDMVWIVGGSSVYKEAM | | |
| T147A); linker | NHPGHLKLFVTRIMQDFESDAFFPEIDLEKYKLLPEYPGVLS | | |
| (SGGGS (SEQ | DVQEEKGIKYKFEVYEKNDSGGGSDEADRRLLRRCRLRLVEE | | |
| ID NO: 3089)); | LQVDQLWDALLSRELFRPHMIEDIQRAGSGSRRDQARQLIID | | |
| Caspase 9; | LETRGSQALPLFISCLEDTGQDMLASFLRTNRQAAKLSKPTL | | |
| stop) | ENLTPVVLRPEIRKPEVLRPETPRPVDIGSGGFGDVGALESL | | |
| | RGNADLAYILSMEPCGHCLIINNVNFCRESGLRTRTGSNIDC | | |
| | EKLRRRFSSLHFMVEVKGDLTAKKMVLALLELAQQDHGALDC | | |
| | CVVVILSHGCQASHLQFPGAVYGTDGCPVSVEKIVNIFNGTS | | |
| | CPSLGGKPKLFFIQACGGEQKDHGFEVASTSPEDESPGSNPE | | |
| | PDATPFQEGLRTFDQLDAISSLPTPSDIFVSYSTFPGFVSWR | | |
| | DPKSGSWYVETLDDIFEQWAHSEDLQSLLLRVANAVSVKGIY | | |
| | KQMPGCFNFLRKKLFFKTS* | | |

TABLE 40
DD-Caspase 9 constructs

| | | | Nucleic Acid |
|---|---|---|---|
| Description | | Amino Acid | SEQ ID NO./ |
| Construct ID | Amino acid sequence | SEQ ID NO. | Sequence |
| Caspase 9 | DEADRRLLRRCRLRLVEELQVDQLWDALLSRELFRPHMIEDIQR | 2742 | 5660, 5661 |
| | AGSGSRRDQARQLIIDLETRGSQALPLFISCLEDTGQDMLASFL | | |
| | RTNRQAAKLSKPTLENLTPVVLRPEIRKPEVLRPETPRPVDIGS | | |
| | GGFGDVGALESLRGNADLAYILSMEPCGHCLIINNVNFCRESGL | | |
| | RTRTGSNIDCEKLRRRFSSLHFMVEVKGDLTAKKMVLALLELAQ | | |
| | QDHGALDCCVVVILSHGCQASHLQFPGAVYGTDGCPVSVEKIVN | | |
| | IFNGTSCPSLGGKPKLFFIQACGGEQKDHGFEVASTSPEDESPG | | |
| | SNPEPDATPFQEGLRTFDQLDAISSLPTPSDIFVSYSTFPGFVS | | |
| | WRDPKSGSWYVETLDDIFEQWAHSEDLQSLLLRVANAVSVKGIY | | |
| | KQMPGCFNFLRKKLFFKTS | | |
| Caspase delta | GVDGFGDVGALESLRGNADLAYILSMEPCGHCLIINNVNFCRES | 2975 | 5662 |
| CD | GLRTRTGSNIDCEKLRRRFSSLHFMVEVKGDLTAKKMVLALLEL | | |
| | ARQDHGALDCCVVVILSHGCQASHLQFPGAVYGTDGCPVSVEKI | | |
| | VNIFNGTSCPSLGGKPKLFFIQACGGEQKDHGFEVASTSPEDES | | |
| | PGSNPEPDATPFQEGLRTFDQLDAISSLPTPSDIFVSYSTFPGF | | |
| | VSWRDPKSGSWYVETLDDIFEQWAHSEDLQSLLLRVANAVSVKG | | |
| | IYKQMPGCFNFLRKKLFFKTS | | |
| Linker | VDYPYDVPDYALD | 2976 | 5663 |
| Linker | SGGGS | 2977 | 5664, 5665, |
| | | | 5666 |
| Linker | QLIGMLQGLMRDL | 3082 | 5667 |
| Linker | SG | — | |
| FKBP (F36V, | GVQVETISPGDGRTFPKRGQTCVVHYTGMLEDGKKVDSSRDRNK | 2778 | 5668, |
| L106P) | PFKFMLGKQEVIRGWEEGVAQMSVGQRAKLTISPDYAYGATGHP | | 5669-5673 |
| | GIIPPHATLVFDVELLKPE | | |
| FKBP (F36V) | GVQVETISPGDGRTFPKRGQTCVVHYTGMLEDGKKVDSSRDRNK | 2978 | 5674 |
| | PFKFMLGKQEVIRGWEEGVAQMSVGQRAKLTISPDYAYGATGHP | | |
| | GIIPPHATLVFDVELLKLE | | |
| FKBP (E31G, | GVQVETISPGDGRTFPKRGQTCVVHYTGMLGDGKKVDSSRDRNK | 2775 | 5675, |
| F36V, R71G, | PFKFMLGKQEVIRGWEEGVAQMSVGQGAKLTISPDYAYGATGHP | | 5676-5682 |
| K105E) | GIIPPHATLVFDVELLELE | | |
| ecDHFR | MISLIAALAVDYVIGMENAMPWNLPADLAWFKRNTLNKPVIMGR | 2979 | 5683 |
| (R12Y, Y100I) | HTWESIGRPLPGRKNIILSSQPGTDDRVTWVKSVDEAIAACGDV | | |
| | PEIMVIGGGRVIEQFLPKAQKLYLTHIDAEVEGDTHFPDYEPDD | | |
| | WESVFSEFHDADAQNSHSYCFEILERR | | |
| ecDHFR | ISLIAALAVDYVIGMENAMPWNLPADLAWFKRNTLNKPVIMGRH | 2980 | 5684 |
| (Amino acid 2- | TWESIGRPLPGRKNIILSSQPGTDDRVTWVKSVDEAIAACGDVP | | |
| 159 of WT) | EIMVIGGGRVYEQFLPKAQKLYLTHIDAEVEGDTHFPDYKPDDW | | |
| (R12Y, E129K) | ESVFSEFHDADAQNSHSYCFEILERR | | |
| ecDHFR | ISLIAALAVDYVIGMENAMPWNLPADLAWFKRNTLNKPVIMGRH | 2774 | 5685, |
| (Amino acid 2- | TWESIGRPLPGRKNIILSSQPGTDDRVTWVKSVDEAIAACGDVP | | 5686-5691 |
| 159 of WT) | EIMVIGGGRVIEQFLPKAQKLYLTHIDAEVEGDTHFPDYEPDDW | | |
| R12Y, Y100I) | ESVFSEFHDADAQNSHSYCFEILERR | | |
| hDHFR | MVGSLNCIVAVSQNMGIGKNGDLPWPPLRNEFRYFQRMTTTSSV | 2981 | 5692 |
| (Y122I) | EGKQNLVIMGKKTWFSIPEKNRPLKGRINLVLSRELKEPPQGAH | | |
| | FLSRSLDDALKLTEQPELANKVDMVWIVGGSSVIKEAMNHPGHL | | |
| | KLFVTRIMQDFESDTFFPEIDLEKYKLLPEYPGVLSDVQEEKGI | | |
| | KYKFEVYEKND | | |
| hDHFR | MVGSLNCIVAVSQNMGIGKNGDLPWPPLRNEFRYFQRMTTTSSV | 2982 | 5693 |
| (V75F, Y122I) | EGKQNLVIMGKKTWFSIPEKNRPLKGRINLFLSRELKEPPQGAH | | |
| | FLSRSLDDALKLTEQPELANKVDMVWIVGGSSVIKEAMNHPGHL | | |
| | KLFVTRIMQDFESDTFFPEIDLEKYKLLPEYPGVLSDVQEEKGI | | |
| | KYKFEVYEKND | | |
| hDHFR | MVGSLNCIVAVSQNMGIGKNGDLPWPPLRNEFRYFQRMTTTSSV | 2983 | 5694 |
| (L94A, T147A) | EGKQNLVIMGKKTWFSIPEKNRPLKGRINLVLSRELKEPPQGAH | | |
| | FLSRSADDALKLTEQPELANKVDMVWIVGGSSVYKEAMNHPGHL | | |
| | KLFVTRIMQDFESDAFFPEIDLEKYKLLPEYPGVLSDVQEEKGI | | |
| | KYKFEVYEKND | | |
| OT-CASP9- | MGVQVETISPGDGRTFPKRGQTCVVHYTGMLEDGKKVDSSRDRN | 1149 | 5695 |
| 001 (Met- | KPFKFMLGKQEVIRGWEEGVAQMSVGQRAKLTISPDYAYGATGH | | |
| FKBP (F36V, | PGIIPPHATLVFDVELLKPESGGGSDEADRRLLRRCRLRLVEEL | | |
| L106P)- | QVDQLWDALLSRELFRPHMIEDIQRAGSGSRRDQARQLIIDLET | | |
| Linker | RGSQALPLFISCLEDTGQDMLASFLRTNRQAAKLSKPTLENLTP | | |
| (SGGGS (SEQ | VVLRPEIRKPEVLRPETPRPVDIGSGGFGDVGALESLRGNADLA | | |
| ID NO: 3089))- | YILSMEPCGHCLIINNVNFCRESGLRTRTGSNIDCEKLRRRFSS | | |
| Caspase 9- | LHFMVEVKGDLTAKKMVLALLELAQQDHGALDCCVVVILSHGCQ | | |
| stop) | ASHLQFPGAVYGTDGCPVSVEKIVNIFNGTSCPSLGGKPKLFFI | | |
| | QACGGEQKDHGFEVASTSPEDESPGSNPEPDATPFQEGLRTFDQ | | |
| | LDAISSLPTPSDIFVSYSTFPGFVSWRDPKSGSWYVETLDDIFE | | |
| | QWAHSEDLQSLLLRVANAVSVKGIYKQMPGCFNFLRKKLFFKTS | | |
| | * | | |
| OT-CASP9- | MISLIAALAVDYVIGMENAMPWNLPADLAWFKRNTLNKPVIMGR | 1150 | 5696 |
| 002 (ecDHFR | HTWESIGRPLPGRKNIILSSQPGTDDRVTWVKSVDEAIAACGDV | | |
| (R12Y, Y100I)- | PEIMVIGGGRVIEQFLPKAQKLYLTHIDAEVEGDTHFPDYEPDD | | |
| Linker | WESVFSEFHDADAQNSHSYCFEILERRSGGGSDEADRRLLRRCR | | |
| (SGGGS (SEQ | LRLVEELQVDQLWDALLSRELFRPHMIEDIQRAGSGSRRDQARQ | | |
| ID NO: 3089))- | LIIDLETRGSQALPLFISCLEDTGQDMLASFLRTNRQAAKLSKP | | |
| Caspase 9- | TLENLTPVVLRPEIRKPEVLRPETPRPVDIGSGGFGDVGALESL | | |
| stop) | RGNADLAYILSMEPCGHCLIINNVNFCRESGLRTRTGSNIDCEK | | |
| | LRRRFSSLHFMVEVKGDLTAKKMVLALLELAQQDHGALDCCVVV | | |
| | ILSHGCQASHLQFPGAVYGTDGCPVSVEKIVNIFNGTSCPSLGG | | |
| | KPKLFFIQACGGEQKDHGFEVASTSPEDESPGSNPEPDATPFQE | | |
| | GLRTFDQLDAISSLPTPSDIFVSYSTFPGFVSWRDPKSGSWYVE | | |
| | TLDDIFEQWAHSEDLQSLLLRVANAVSVKGIYKQMPGCFNFLRK | | |
| | KLFFKTS* | | |
| OT-CASP9- | MVGSLNCIVAVSQNMGIGKNGDLPWPPLRNEFRYFQRMTTTSSV | 1151 | 5697 |
| 003 (hDHFR | EGKQNLVIMGKKTWFSIPEKNRPLKGRINLVLSRELKEPPQGAH | | |
| (Y122I)- | FLSRSLDDALKLTEQPELANKVDMVWIVGGSSVIKEAMNHPGHL | | |
| Linker | KLFVTRIMQDFESDTFFPEIDLEKYKLLPEYPGVLSDVQEEKGI | | |
| (SGGGS (SEQ | KYKFEVYEKNDSGGGSDEADRRLLRRCRLRLVEELQVDQLWDAL | | |
| ID NO: 3089))- | LSRELFRPHMIEDIQRAGSGSRRDQARQLIIDLETRGSQALPLF | | |
| Caspase 9- | ISCLEDTGQDMLASFLRTNRQAAKLSKPTLENLTPVVLRPEIRK | | |
| stop) | PEVLRPETPRPVDIGSGGFGDVGALESLRGNADLAYILSMEPCG | | |
| | HCLIINNVNFCRESGLRTRTGSNIDCEKLRRRFSSLHFMVEVKG | | |
| | DLTAKKMVLALLELAQQDHGALDCCVVVILSHGCQASHLQFPGA | | |
| | VYGTDGCPVSVEKIVNIFNGTSCPSLGGKPKLFFIQACGGEQKD | | |
| | HGFEVASTSPEDESPGSNPEPDATPFQEGLRTFDQLDAISSLPT | | |
| | PSDIFVSYSTFPGFVSWRDPKSGSWYVETLDDIFEQWAHSEDLQ | | |
| | SLLLRVANAVSVKGIYKQMPGCFNFLRKKLFFKTS* | | |
| OT-CASP9- | MVGSLNCIVAVSQNMGIGKNGDLPWPPLRNEFRYFQRMTTTSSV | 1152 | 5698 |
| 004 (hDHFR | EGKQNLVIMGKKTWFSIPEKNRPLKGRINLFLSRELKEPPQGAH | | |
| (V75F, Y122I)- | FLSRSLDDALKLTEQPELANKVDMVWIVGGSSVIKEAMNHPGHL | | |
| Linker | KLFVTRIMQDFESDTFFPEIDLEKYKLLPEYPGVLSDVQEEKGI | | |
| (SGGGS (SEQ | KYKFEVYEKNDSGGGSDEADRRLLRRCRLRLVEELQVDQLWDAL | | |
| ID NO: 3089))- | LSRELFRPHMIEDIQRAGSGSRRDQARQLIIDLETRGSQALPLF | | |
| Caspase 9- | ISCLEDTGQDMLASFLRTNRQAAKLSKPTLENLTPVVLRPEIRK | | |
| stop) | PEVLRPETPRPVDIGSGGFGDVGALESLRGNADLAYILSMEPCG | | |
| | HCLIINNVNFCRESGLRTRTGSNIDCEKLRRRFSSLHFMVEVKG | | |
| | DLTAKKMVLALLELAQQDHGALDCCVVVILSHGCQASHLQFPGA | | |
| | VYGTDGCPVSVEKIVNIFNGTSCPSLGGKPKLFFIQACGGEQKD | | |
| | HGFEVASTSPEDESPGSNPEPDATPFQEGLRTFDQLDAISSLPT | | |
| | PSDIFVSYSTFPGFVSWRDPKSGSWYVETLDDIFEQWAHSEDLQ | | |
| | SLLLRVANAVSVKGIYKQMPGCFNFLRKKLFFKTS* | | |
| OT-CASP9- | MVGSLNCIVAVSQNMGIGKNGDLPWPPLRNEFRYFQRMTTTSSV | 1153 | 5699 |
| 005 (hDHFR | EGKQNLVIMGKKTWFSIPEKNRPLKGRINLVLSRELKEPPQGAH | | |
| (L94A, | FLSRSADDALKLTEQPELANKVDMVWIVGGSSVYKEAMNHPGHL | | |
| T147A)- | KLFVTRIMQDFESDAFFPEIDLEKYKLLPEYPGVLSDVQEEKGI | | |
| Linker | KYKFEVYEKNDSGGGSDEADRRLLRRCRLRLVEELQVDQLWDAL | | |
| (SGGGS (SEQ | LSRELFRPHMIEDIQRAGSGSRRDQARQLIIDLETRGSQALPLF | | |
| ID NO: 3089))- | ISCLEDTGQDMLASFLRTNRQAAKLSKPTLENLTPVVLRPEIRK | | |
| Caspase 9- | PEVLRPETPRPVDIGSGGFGDVGALESLRGNADLAYILSMEPCG | | |
| stop) | HCLIINNVNFCRESGLRTRTGSNIDCEKLRRRFSSLHFMVEVKG | | |
| | DLTAKKMVLALLELAQQDHGALDCCVVVILSHGCQASHLQFPGA | | |
| | VYGTDGCPVSVEKIVNIFNGTSCPSLGGKPKLFFIQACGGEQKD | | |
| | HGFEVASTSPEDESPGSNPEPDATPFQEGLRTFDQLDAISSLPT | | |
| | PSDIFVSYSTFPGFVSWRDPKSGSWYVETLDDIFEQWAHSEDLQ | | |
| | SLLLRVANAVSVKGIYKQMPGCFNFLRKKLFFKTS* | | |
| OT-CASP9- | MLEGVQVETISPGDGRTFPKRGQTCVVHYTGMLEDGKKVDSSRD | 1154 | 5700 |
| 006 (Met- | RNKPFKFMLGKQEVIRGWEEGVAQMSVGQRAKLTISPDYAYGAT | | |
| Leu-Glu- | GHPGIIPPHATLVFDVELLKLESGGGSGVDGFGDVGALESLRGN | | |
| FKBP (F36V)- | ADLAYILSMEPCGHCLIINNVNFCRESGLRTRTGSNIDCEKLRR | | |
| Linker | RFSSLHFMVEVKGDLTAKKMVLALLELARQDHGALDCCVVVILS | | |
| (SGGGS (SEQ | HGCQASHLQFPGAVYGTDGCPVSVEKIVNIFNGTSCPSLGGKPK | | |
| ID NO: 3089))- | LFFIQACGGEQKDHGFEVASTSPEDESPGSNPEPDATPFQEGLR | | |
| Caspase | TFDQLDAISSLPTPSDIFVSYSTFPGFVSWRDPKSGSWYVETLD | | |
| Delta CD- | DIFEQWAHSEDLQSLLLRVANAVSVKGIYKQMPGCFNFLRKKLF | | |
| Linker | FKTSQLIGMLQGLMRDL* | | |
| (QLIGMLQG | | | |
| LMRDL (SEQ | | | |
| ID NO: 3090))- | | | |
| stop) | | | |
| OT-CASP9- | MDEADRRLLRRCRLRLVEELQVDQLWDALLSRELFRPHMIEDIQ | 1155 | 5701 |
| 007 (Met- | RAGSGSRRDQARQLIIDLETRGSQALPLFISCLEDTGQDMLASF | | |
| Caspase 9- | LRTNRQAAKLSKPTLENLTPVVLRPEIRKPEVLRPETPRPVDIG | | |
| Linker (SG)- | SGGFGDVGALESLRGNADLAYILSMEPCGHCLIINNVNFCRESG | | |
| FKBP (E31G, | LRTRTGSNIDCEKLRRRFSSLHFMVEVKGDLTAKKMVLALLELA | | |
| F36V, R71G, | QQDHGALDCCVVVILSHGCQASHLQFPGAVYGTDGCPVSVEKIV | | |
| K105E)-stop) | NIFNGTSCPSLGGKPKLFFIQACGGEQKDHGFEVASTSPEDESP | | |
| | GSNPEPDATPFQEGLRTFDQLDAISSLPTPSDIFVSYSTFPGFV | | |
| | SWRDPKSGSWYVETLDDIFEQWAHSEDLQSLLLRVANAVSVKGI | | |
| | YKQMPGCFNFLRKKLFFKTSSGGVQVETISPGDGRTFPKRGQTC | | |
| | VVHYTGMLGDGKKVDSSRDRNKPFKFMLGKQEVIRGWEEGVAQM | | |
| | SVGQGAKLTISPDYAYGATGHPGIIPPHATLVFDVELLELE* | | |
| OT-CASP9- | MDEADRRLLRRCRLRLVEELQVDQLWDALLSRELFRPHMIEDIQ | 1156 | 5702 |
| 008 (Met- | RAGSGSRRDQARQLIIDLETRGSQALPLFISCLEDTGQDMLASF | | |
| Caspase 9- | LRTNRQAAKLSKPTLENLTPVVLRPEIRKPEVLRPETPRPVDIG | | |
| Linker (SG)- | SGGFGDVGALESLRGNADLAYILSMEPCGHCLIINNVNFCRESG | | |
| ecDHFR | LRTRTGSNIDCEKLRRRFSSLHFMVEVKGDLTAKKMVLALLELA | | |
| (Amino acid 2- | QQDHGALDCCVVVILSHGCQASHLQFPGAVYGTDGCPVSVEKIV | | |
| 159 of WT) | NIFNGTSCPSLGGKPKLFFIQACGGEQKDHGFEVASTSPEDESP | | |
| (R12Y, Y100I)- | GSNPEPDATPFQEGLRTFDQLDAISSLPTPSDIFVSYSTFPGFV | | |
| stop | SWRDPKSGSWYVETLDDIFEQWAHSEDLQSLLLRVANAVSVKGI | | |
| | YKQMPGCFNFLRKKLFFKTSSGISLIAALAVDYVIGMENAMPWN | | |
| | LPADLAWFKRNTLNKPVIMGRHTWESIGRPLPGRKNIILSSQPG | | |
| | TDDRVTWVKSVDEAIAACGDVPEIMVIGGGRVIEQFLPKAQKLY | | |
| | LTHIDAEVEGDTHFPDYEPDDWESVFSEFHDADAQNSHSYCFEI | | |
| | LERR* | | |
| OT-CASP9- | MDEADRRLLRRCRLRLVEELQVDQLWDALLSRELFRPHMIEDIQ | 1157 | 5703 |
| 009 (Met- | RAGSGSRRDQARQLIIDLETRGSQALPLFISCLEDTGQDMLASF | | |
| Caspase 9- | LRTNRQAAKLSKPTLENLTPVVLRPEIRKPEVLRPETPRPVDIG | | |
| ecDHFR | SGGFGDVGALESLRGNADLAYILSMEPCGHCLIINNVNFCRESG | | |
| (Amino acid 2- | LRTRTGSNIDCEKLRRRFSSLHFMVEVKGDLTAKKMVLALLELA | | |
| 159 of WT) | QQDHGALDCCVVVILSHGCQASHLQFPGAVYGTDGCPVSVEKIV | | |
| (R12Y, E129K)- | NIFNGTSCPSLGGKPKLFFIQACGGEQKDHGFEVASTSPEDESP | | |
| stop) | GSNPEPDATPFQEGLRTFDQLDAISSLPTPSDIFVSYSTFPGFV | | |
| | SWRDPKSGSWYVETLDDIFEQWAHSEDLQSLLLRVANAVSVKGI | | |
| | YKQMPGCFNFLRKKLFFKTSSGISLIAALAVDYVIGMENAMPWN | | |
| | LPADLAWFKRNTLNKPVIMGRHTWESIGRPLPGRKNIILSSQPG | | |
| | TDDRVTWVKSVDEAIAACGDVPEIMVIGGGRVYEQFLPKAQKLY | | |
| | LTHIDAEVEGDTHFPDYKPDDWESVFSEFHDADAQNSHSYCFEI | | |
| | LERR* | | |

[0658] In some instances, the iCasp9/CTD system has been shown to have a basal rate of dimerization even in the absence of rimiducid, resulting in unintended cell death. Regulating the expression levels of iCasp9/CD is critical for maximizing the efficacy of iCasp9/CD system. Biocircuits of the present invention and/or any of their components may be utilized in regulating or tuning the iCasp9/CID system to optimize its utility. Other examples of proteins used in dimerization-induced apoptosis paradigm may include, but are not limited to Fas receptor, the death effector domain of Fas-associated protein, FADD, Caspase 1, Caspase 3, Caspase 7 and Caspase 8. (Belshaw P. J. et al, Chem Biol., 996,3:731-738; MacCorkle R. A. et al, Proc Natl Acad Sci, 1998, 95:3655-3660; Spencer, D. M. et al., Curr Biol. 1996; 6:839-847; the contents of each of which are incorporated herein by reference in their entirety).

[0659] In some embodiments, the safety switch of the present invention may comprise a metabolic enzyme, such as herpes simplex virus thymidine kinase (HSV-TK) and cytosine deaminase (CD). HSV-TK phosphorylates nucleoside analogs, including acyclovir and ganciclovir (GCV) to generate triphosphate form of nucleosides. When incorporated into DNA, it leads to chain termination and cell death. Unlike the mammalian thymidine kinase, HSV-TK is characterized by 1000-fold higher affinity to nucleoside analogs such as GCV, making it suitable for use as a suicide gene in mammalian cells. Cytosine deaminase (CD) can converts 5-fluorocytosine (5-FC) into the cytotoxic 5-fluorouracil (5-FU) (Tiraby et al., FEMS Lett., 1998, 167: 41-49).

[0660] In some embodiments, the safety switch of the present invention may comprise a CYP4B1 mutant (as suicide gene), which may be co-expressed in a CAR engineered T cells (Roellecker et al., Gen Ther., 2016, May 19, doi: 10.1038/gt.2016.38.).

[0661] In some embodiments, the payload of the present invention may comprise a fusion construct that can induce cell death, for example, a polypeptide with the formula of St-R1-S1-Q-S2-R2, wherein the St is a stalk sequence, R1/2 and Q are different epitopes; and S1/2 are optional spacer sequences (See International Patent Publication NO. WO2013153391; the content of which are incorporated herein by reference in their entirety).

[0662] In some embodiments, safety switch may be mediated by therapeutic antibodies which specifically bind to an antigen that is expressed in the plasma membrane of adoptively transferred cells. The antigen-antibody interaction allows cell removal after administration of a specific monoclonal antibody against the antigen. As non-limiting examples, payloads of the present invention may comprise the antigen and antibody pair used to mediate safety switch such as CD20 and anti-CD20 antibody (Griffioen et al., Haematologica, 2009, 94:1316-1320), a protein tag and anti-tag antibody (Kieback et al., Natl. Acad. Sci. U.S.A., 2008, 105: 623-628), a compact suicide gene (RQR8) combining epitopes from CD34 (as a marker moiety) and CD20 (as a suicide moiety) which enables CD34 selection, cell tracking, as well as cell deletion after anti-CD20 monoclonal antibody administration (Philip et al., Blood, 2014, 124: 1277-1287); truncated human EGFR polypeptide and anti-EGFR monoclonal antibody (Wang et al., Blood, 2011, 118:1255-1263); and a compact polypeptide safety switch having a structural formula as discussed in U.S. Patent Application Publication NO. US20150093401; the contents of each of which are incorporated herein by reference in their entirety.

### Regulatory Switch

[0663] The utility of adoptive cell therapy (ACT) has been limited by the high incidence of graft versus host disease (GVHD). GVHD occurs when adoptively transferred T cells elicit an immune response resulting in host tissue damage. Recognition of host antigens by the graft cells triggers a proinflammatory cytokine storm cascade that signifies acute GVHD. GVHD is characterized as an imbalance between the effector and the regulatory arms of the immune system. In some embodiments, the payloads of the present invention may be used as regulatory switches. As used herein “regulatory switch” refers proteins, which when expressed in target cells increase tolerance to the graft by enhancing the regulatory arm of the immune system.

[0664] In one embodiment, regulatory switches may include payloads that preferentially promote the expansion of regulatory T (Treg cells). Tregs are a distinct population of cells that are positively selected on high affinity ligands in the thymus and play an important role in the tolerance to self-antigens. In addition, T regs have also been shown to play a role in peripheral tolerance to foreign antigens. Since Tregs promote immune tolerance, expansion of Tregs with the compositions of the invention may be desirable to limit GVHD.

[0665] In some embodiments, the regulatory switch may include, but is not limited to T regs activation factors such NFκB, FOXO, nuclear receptor Nr4a, Retinoic acid receptor alpha, NFAT, AP-1 and SMAD. Such factors can result in the expression of Fork headbox P3 (FOXP3) in T cells resulting in the activation of the regulatory T cell program and the expansion of T cells.

[0666] In one embodiment, the regulatory switch may be FOXP3, a transcriptional regulator in T cells. A function of FOXP3 is to suppress the function of NFAT, which leads to the suppression of expression of many genes including IL2 and effector T-cell cytokines. FOXP3 acts also as a transcription activator for genes such as CD2S, Cytotoxic T-Lymphocyte Antigen Cytotoxic T-Lymphocyte Antigen 4 (CTLA4), glucocorticoid-induced TNF receptor family gene (GITR) and folate receptor 4. FOXP3 also inhibits the differentiation of IL17 producing helper T-cells (Th17) by antagonizing RORC (RAR related orphan receptor C). Isoforms of FOXP3 lacking exon2 (FOXP3 delta 2), or exon 7 (FOXP3 delta 7) may also be used as regulatory switches. In one aspect, the effector module of the invention may be a DD-FOXP3 fusion polypeptide. The DD-FOXP3 may comprise the amino acid sequences provided in Table 41. The amino acid sequences in Table 41 may comprise a stop codon which is denoted in the table with a “*k” at the end of the amino acid sequence.

TABLE 41
DD-FOXP3 constructs

| Construct | | Amino Acid | Nucleic Acid |
|---|---|---|---|
| Description | Amino Acid sequence | SEQ ID NO. | SEQ ID NO. |
| Linker | SGGGS | 2977 | 5704, 5705, |
| | | | 5706 |
| Linker | SG | — | |
| FKBP (F36V, | GVQVETISPGDGRTFPKRGQTCVVHYTGMLEDGKKVD | 2778 | 5707, |
| L106P) | SSRDRNKPFKFMLGKQEVIRGWEEGVAQMSVGQRAKL | | 5708-5712 |
| | TISPDYAYGATGHPGIIPPHATLVFDVELLKPE | | |
| FKBP (E31G, | GVQVETISPGDGRTFPKRGQTCVVHYTGMLGDGKKVD | 2775 | 5713, |
| F36V, R71G, | SSRDRNKPFKFMLGKQEVIRGWEEGVAQMSVGQGAKL | | 5714-5720 |
| K105E) | TISPDYAYGATGHPGIIPPHATLVFDVELLELEMISL | | |
| ecDHFR | IAALAVDYVIGMENAMPWNLPADLAWFKRNTLNKPVI | 2979 | 5721 |
| (R12Y, | MGRHTWESIGRPLPGRKNIILSSQPGTDDRVTWVKSV | | |
| Y100I) | DEAIAACGDVPEIMVIGGGRVIEQFLPKAQKLYLTHI | | |
| | DAEVEGDTHFPDYEPDDWESVFSEFHDADAQNSHSYC | | |
| | FEILERR | | |
| ecDHFR | ISLIAALAVDYVIGMENAMPWNLPADLAWFKRNTLNK | 2774 | 5722, 5723, |
| (Amino acid | PVIMGRHTWESIGRPLPGRKNIILSSQPGTDDRVTWV | | 5724 |
| 2-159 of WT) | KSVDEAIAACGDVPEIMVIGGGRVIEQFLPKAQKLYL | | |
| (R12Y, Y100I) | THIDAEVEGDTHFPDYEPDDWESVFSEFHDADAQNSH | | |
| | SYCFEILERR | | |
| FOXP3 full | MPNPRPGKPSAPSLALGPSPGASPSWRAAPKASDLLG | 2771 | 5725 |
| length | ARGPGGTFQGRDLRGGAHASSSSLNPMPPSQLQLPTL | | |
| | PLVMVAPSGARLGPLPHLQALLQDRPHFMHQLSTVDA | | |
| | HARTPVLQVHPLESPAMISLTPPTTATGVFSLKARPG | | |
| | LPPGINVASLEWVSREPALLCTFPNPSAPRKDSTLSA | | |
| | VPQSSYPLLANGVCKWPGCEKVFEEPEDFLKHCQADH | | |
| | LLDEKGRAQCLLQREMVQSLEQQLVLEKEKLSAMQAH | | |
| | LAGKMALTKASSVASSDKGSCCIVAAGSQGPVVPAWS | | |
| | GPREAPDSLFAVRRHLWGSHGNSTFPEFLHNMDYFKF | | |
| | HNMRPPFTYATLIRWAILEAPEKQRTLNEIYHWFTRM | | |
| | FAFFRNHPATWKNAIRHNLSLHKCFVRVESEKGAVWT | | |
| | VDELEFRKKRSQRPSRCSNPTPGP* | | |
| Amino Acid | PNPRPGKPSAPSLALGPSPGASPSWRAAPKASDLLGA | 746 | 5726 |
| 2-431 of | RGPGGTFQGRDLRGGAHASSSSLNPMPPSQLQLPTLP | | |
| FOXP3 full | LVMVAPSGARLGPLPHLQALLQDRPHFMHQLSTVDAH | | |
| length | ARTPVLQVHPLESPAMISLTPPTTATGVFSLKARPGL | | |
| | PPGINVASLEWVSREPALLCTFPNPSAPRKDSTLSAV | | |
| | PQSSYPLLANGVCKWPGCEKVFEEPEDFLKHCQADHL | | |
| | LDEKGRAQCLLQREMVQSLEQQLVLEKEKLSAMQAHL | | |
| | AGKMALTKASSVASSDKGSCCIVAAGSQGPVVPAWSG | | |
| | PREAPDSLFAVRRHLWGSHGNSTFPEFLHNMDYFKFH | | |
| | NMRPPFTYATLIRWAILEAPEKQRTLNEIYHWFTRMF | | |
| | AFFRNHPATWKNAIRHNLSLHKCFVRVESEKGAVWTV | | |
| | DELEFRKKRSQRPSRCSNPTPGP | | |
| FOXP3 delta | MPNPRPGKPSAPSLALGPSPGASPSWRAAPKASDLLG | 747 | 5727 |
| 2 | ARGPGGTFQGRDLRGGAHASSSSLNPMPPSQLQLSTV | | |
| | DAHARTPVLQVHPLESPAMISLTPPTTATGVFSLKAR | | |
| | PGLPPGINVASLEWVSREPALLCTFPNPSAPRKDSTL | | |
| | SAVPQSSYPLLANGVCKWPGCEKVFEEPEDFLKHCQA | | |
| | DHLLDEKGRAQCLLQREMVQSLEQQLVLEKEKLSAMQ | | |
| | AHLAGKMALTKASSVASSDKGSCCIVAAGSQGPVVPA | | |
| | WSGPREAPDSLFAVRRHLWGSHGNSTFPEFLHNMDYF | | |
| | KFHNMRPPFTYATLIRWAILEAPEKQRTLNEIYHWFT | | |
| | RMFAFFRNHPATWKNAIRHNLSLHKCFVRVESEKGAV | | |
| | WTVDELEFRKKRSQRPSRCSNPTPGP | | |
| FOXP3 delta | PNPRPGKPSAPSLALGPSPGASPSWRAAPKASDLLGA | 748 | 5728 |
| 2 | RGPGGTFQGRDLRGGAHASSSSLNPMPPSQLQLSTVD | | |
| | AHARTPVLQVHPLESPAMISLTPPTTATGVFSLKARP | | |
| | GLPPGINVASLEWVSREPALLCTFPNPSAPRKDSTLS | | |
| | AVPQSSYPLLANGVCKWPGCEKVFEEPEDFLKHCQAD | | |
| | HLLDEKGRAQCLLQREMVQSLEQQLVLEKEKLSAMQA | | |
| | HLAGKMALTKASSVASSDKGSCCIVAAGSQGPVVPAW | | |
| | SGPREAPDSLFAVRRHLWGSHGNSTFPEFLHNMDYFK | | |
| | FHNMRPPFTYATLIRWAILEAPEKQRTLNEIYHWFTR | | |
| | MFAFFRNHPATWKNAIRHNLSLHKCFVRVESEKGAVW | | |
| | TVDELEFRKKRSQRPSRCSNPTPGP | | |
| OT-FOXP3- | MPNPRPGKPSAPSLALGPSPGASPSWRAAPKASDLLG | 1158 | 5729 |
| 001 (FoxP3- | ARGPGGTFQGRDLRGGAHASSSSLNPMPPSQLQLPTL | | |
| stop) | PLVMVAPSGARLGPLPHLQALLQDRPHFMHQLSTVDA | | |
| | HARTPVLQVHPLESPAMISLTPPTTATGVFSLKARPG | | |
| | LPPGINVASLEWVSREPALLCTFPNPSAPRKDSTLSA | | |
| | VPQSSYPLLANGVCKWPGCEKVFEEPEDFLKHCQADH | | |
| | LLDEKGRAQCLLQREMVQSLEQQLVLEKEKLSAMQAH | | |
| | LAGKMALTKASSVASSDKGSCCIVAAGSQGPVVPAWS | | |
| | GPREAPDSLFAVRRHLWGSHGNSTFPEFLHNMDYFKF | | |
| | HNMRPPFTYATLIRWAILEAPEKQRTLNEIYHWFTRM | | |
| | FAFFRNHPATWKNAIRHNLSLHKCFVRVESEKGAVWT | | |
| | VDELEFRKKRSQRPSRCSNPTPGP* | | |
| OT-FOXP3- | MPNPRPGKPSAPSLALGPSPGASPSWRAAPKASDLLG | 1159 | 5730 |
| 002 (FoxP3 | ARGPGGTFQGRDLRGGAHASSSSLNPMPPSQLQLSTV | | |
| Delta 2- | DAHARTPVLQVHPLESPAMISLTPPTTATGVFSLKAR | | |
| stop) | PGLPPGINVASLEWVSREPALLCTFPNPSAPRKDSTL | | |
| | SAVPQSSYPLLANGVCKWPGCEKVFEEPEDFLKHCQA | | |
| | DHLLDEKGRAQCLLQREMVQSLEQQLVLEKEKLSAMQ | | |
| | AHLAGKMALTKASSVASSDKGSCCIVAAGSQGPVVPA | | |
| | WSGPREAPDSLFAVRRHLWGSHGNSTFPEFLHNMDYF | | |
| | KFHNMRPPFTYATLIRWAILEAPEKQRTLNEIYHWFT | | |
| | RMFAFFRNHPATWKNAIRHNLSLHKCFVRVESEKGAV | | |
| | WTVDELEFRKKRSQRPSRCSNPTPGP* | | |
| OT-FOXP3- | MGVQVETISPGDGRTFPKRGQTCVVHYTGMLEDGKKV | 1160 | 5731 |
| 003 (Met- | DSSRDRNKPFKFMLGKQEVIRGWEEGVAQMSVGQRAK | | |
| FKBP (F36V, | LTISPDYAYGATGHPGIIPPHATLVFDVELLKPESGG | | |
| L106P) - | GSPNPRPGKPSAPSLALGPSPGASPSWRAAPKASDLL | | |
| Linker | GARGPGGTFQGRDLRGGAHASSSSLNPMPPSQLQLPT | | |
| (SGGGS | LPLVMVAPSGARLGPLPHLQALLQDRPHFMHQLSTVD | | |
| (SEQ ID NO: | AHARTPVLQVHPLESPAMISLTPPTTATGVFSLKARP | | |
| 3089))- | GLPPGINVASLEWVSREPALLCTFPNPSAPRKDSTLS | | |
| Amino Acid | AVPQSSYPLLANGVCKWPGCEKVFEEPEDFLKHCQAD | | |
| 2-431 of | HLLDEKGRAQCLLQREMVQSLEQQLVLEKEKLSAMQA | | |
| FOXP3 full | HLAGKMALTKASSVASSDKGSCCIVAAGSQGPVVPAW | | |
| length-stop) | SGPREAPDSLFAVRRHLWGSHGNSTFPEFLHNMDYFK | | |
| | FHNMRPPFTYATLIRWAILEAPEKQRTLNEIYHWFTR | | |
| | MFAFFRNHPATWKNAIRHNLSLHKCFVRVESEKGAVW | | |
| | TVDELEFRKKRSQRPSRCSNPTPGP* | | |
| OT-FOXP3- | MISLIAALAVDYVIGMENAMPWNLPADLAWFKRNTLN | 1161 | 5732 |
| 004 (ecDHFR | KPVIMGRHTWESIGRPLPGRKNIILSSQPGTDDRVTW | | |
| (R12Y, | VKSVDEAIAACGDVPEIMVIGGGRVIEQFLPKAQKLY | | |
| Y100I)- | LTHIDAEVEGDTHFPDYEPDDWESVFSEFHDADAQNS | | |
| Linker | HSYCFEILERRSGGGSPNPRPGKPSAPSLALGPSPGA | | |
| (SGGGS | SPSWRAAPKASDLLGARGPGGTFQGRDLRGGAHASSS | | |
| (SEQ ID NO: | SLNPMPPSQLQLPTLPLVMVAPSGARLGPLPHLQALL | | |
| 3089))- | QDRPHFMHQLSTVDAHARTPVLQVHPLESPAMISLTP | | |
| Amino Acid | PTTATGVFSLKARPGLPPGINVASLEWVSREPALLCT | | |
| 2-431 of | FPNPSAPRKDSTLSAVPQSSYPLLANGVCKWPGCEKV | | |
| FOXP3 full | FEEPEDFLKHCQADHLLDEKGRAQCLLQREMVQSLEQ | | |
| length-stop) | QLVLEKEKLSAMQAHLAGKMALTKASSVASSDKGSCC | | |
| | IVAAGSQGPVVPAWSGPREAPDSLFAVRRHLWGSHGN | | |
| | STFPEFLHNMDYFKFHNMRPPFTYATLIRWAILEAPE | | |
| | KQRTLNEIYHWFTRMFAFFRNHPATWKNAIRHNLSLH | | |
| | KCFVRVESEKGAVWTVDELEFRKKRSQRPSRCSNPTP | | |
| | GP* | | |
| OT-FOXP3- | MPNPRPGKPSAPSLALGPSPGASPSWRAAPKASDLLG | 1162 | 5733 |
| 005 (FoxP3- | ARGPGGTFQGRDLRGGAHASSSSLNPMPPSQLQLPTL | | |
| Linker (SG)- | PLVMVAPSGARLGPLPHLQALLQDRPHFMHQLSTVDA | | |
| FKBP (E31G, | HARTPVLQVHPLESPAMISLTPPTTATGVFSLKARPG | | |
| F36V, R71G, | LPPGINVASLEWVSREPALLCTFPNPSAPRKDSTLSA | | |
| K105E)-stop) | VPQSSYPLLANGVCKWPGCEKVFEEPEDFLKHCQADH | | |
| | LLDEKGRAQCLLQREMVQSLEQQLVLEKEKLSAMQAH | | |
| | LAGKMALTKASSVASSDKGSCCIVAAGSQGPVVPAWS | | |
| | GPREAPDSLFAVRRHLWGSHGNSTFPEFLHNMDYFKF | | |
| | HNMRPPFTYATLIRWAILEAPEKQRTLNEIYHWFTRM | | |
| | FAFFRNHPATWKNAIRHNLSLHKCFVRVESEKGAVWT | | |
| | VDELEFRKKRSQRPSRCSNPTPGPSGGVQVETISPGD | | |
| | GRTFPKRGQTCVVHYTGMLGDGKKVDSSRDRNKPFKF | | |
| | MLGKQEVIRGWEEGVAQMSVGQGAKLTISPDYAYGAT | | |
| | GHPGIIPPHATLVFDVELLELE* | | |
| OT-FOXP3- | MPNPRPGKPSAPSLALGPSPGASPSWRAAPKASDLLG | 1163 | 5734 |
| 006 | ARGPGGTFQGRDLRGGAHASSSSLNPMPPSQLQLPTL | | |
| (FoxP3- | PLVMVAPSGARLGPLPHLQALLQDRPHFMHQLSTVDA | | |
| Linker (SG)- | HARTPVLQVHPLESPAMISLTPPTTATGVFSLKARPG | | |
| ecDHFR | LPPGINVASLEWVSREPALLCTFPNPSAPRKDSTLSA | | |
| (Amino acid | VPQSSYPLLANGVCKWPGCEKVFEEPEDFLKHCQADH | | |
| 2-159 of WT) | LLDEKGRAQCLLQREMVQSLEQQLVLEKEKLSAMQAH | | |
| (R12Y, | LAGKMALTKASSVASSDKGSCCIVAAGSQGPVVPAWS | | |
| Y100I)-stop) | GPREAPDSLFAVRRHLWGSHGNSTFPEFLHNMDYFKF | | |
| | HNMRPPFTYATLIRWAILEAPEKQRTLNEIYHWFTRM | | |
| | FAFFRNHPATWKNAIRHNLSLHKCFVRVESEKGAVWT | | |
| | VDELEFRKKRSQRPSRCSNPTPGPSGISLIAALAVDY | | |
| | VIGMENAMPWNLPADLAWFKRNTLNKPVIMGRHTWES | | |
| | IGRPLPGRKNIILSSQPGTDDRVTWVKSVDEAIAACG | | |
| | DVPEIMVIGGGRVIEQFLPKAQKLYLTHIDAEVEGDT | | |
| | HFPDYEPDDWESVFSEFHDADAQNSHSYCFEILERR* | | |
| OT-FOXP3- | MGVQVETISPGDGRTFPKRGQTCVVHYTGMLEDGKKV | 1164 | 5735 |
| 007 (Met- | DSSRDRNKPFKFMLGKQEVIRGWEEGVAQMSVGQRAK | | |
| FKBP (F36V, | LTISPDYAYGATGHPGIIPPHATLVFDVELLKPESGP | | |
| L106P)- | NPRPGKPSAPSLALGPSPGASPSWRAAPKASDLLGAR | | |
| Linker (SG)- | GPGGTFQGRDLRGGAHASSSSLNPMPPSQLQLSTVDA | | |
| Amino Acid | HARTPVLQVHPLESPAMISLTPPTTATGVFSLKARPG | | |
| 2-396 of | LPPGINVASLEWVSREPALLCTFPNPSAPRKDSTLSA | | |
| FOXP3 delta | VPQSSYPLLANGVCKWPGCEKVFEEPEDFLKHCQADH | | |
| 2-stop) | LLDEKGRAQCLLQREMVQSLEQQLVLEKEKLSAMQAH | | |
| | LAGKMALTKASSVASSDKGSCCIVAAGSQGPVVPAWS | | |
| | GPREAPDSLFAVRRHLWGSHGNSTFPEFLHNMDYFKF | | |
| | HNMRPPFTYATLIRWAILEAPEKQRTLNEIYHWFTRM | | |
| | FAFFRNHPATWKNAIRHNLSLHKCFVRVESEKGAVWT | | |
| | VDELEFRKKRSQRPSRCSNPTPGP* | | |
| OT-FOXP3- | MISLIAALAVDYVIGMENAMPWNLPADLAWFKRNTLN | 1165 | 5736 |
| 008 (ecDHFR | KPVIMGRHTWESIGRPLPGRKNIILSSQPGTDDRVTW | | |
| (R12Y, | VKSVDEAIAACGDVPEIMVIGGGRVIEQFLPKAQKLY | | |
| Y100I)- | LTHIDAEVEGDTHFPDYEPDDWESVFSEFHDADAQNS | | |
| Linker (SG)- | HSYCFEILERRSGPNPRPGKPSAPSLALGPSPGASPS | | |
| Amino Acid | WRAAPKASDLLGARGPGGTFQGRDLRGGAHASSSSLN | | |
| 2-396 of | PMPPSQLQLSTVDAHARTPVLQVHPLESPAMISLTPP | | |
| FOXP3 delta | TTATGVFSLKARPGLPPGINVASLEWVSREPALLCTF | | |
| 2-stop) | PNPSAPRKDSTLSAVPQSSYPLLANGVCKWPGCEKVF | | |
| | EEPEDFLKHCQADHLLDEKGRAQCLLQREMVQSLEQQ | | |
| | LVLEKEKLSAMQAHLAGKMALTKASSVASSDKGSCCI | | |
| | VAAGSQGPVVPAWSGPREAPDSLFAVRRHLWGSHGNS | | |
| | TFPEFLHNMDYFKFHNMRPPFTYATLIRWAILEAPEK | | |
| | QRTLNEIYHWFTRMFAFFRNHPATWKNAIRHNLSLHK | | |
| | CFVRVESEKGAVWTVDELEFRKKRSQRPSRCSNPTPG | | |
| | P* | | |
| OT-FOXP3- | MPNPRPGKPSAPSLALGPSPGASPSWRAAPKASDLLG | 1166 | 5737 |
| 009 (FoxP3 | ARGPGGTFQGRDLRGGAHASSSSLNPMPPSQLQLSTV | | |
| Delta 2- | DAHARTPVLQVHPLESPAMISLTPPTTATGVFSLKAR | | |
| Linker (SG)- | PGLPPGINVASLEWVSREPALLCTFPNPSAPRKDSTL | | |
| FKBP(E31 G, | SAVPQSSYPLLANGVCKWPGCEKVFEEPEDFLKHCQA | | |
| F36V, R71G, | DHLLDEKGRAQCLLQREMVQSLEQQLVLEKEKLSAMQ | | |
| K105E)-stop) | AHLAGKMALTKASSVASSDKGSCCIVAAGSQGPVVPA | | |
| | WSGPREAPDSLFAVRRHLWGSHGNSTFPEFLHNMDYF | | |
| | KFHNMRPPFTYATLIRWAILEAPEKQRTLNEIYHWFT | | |
| | RMFAFFRNHPATWKNAIRHNLSLHKCFVRVESEKGAV | | |
| | WTVDELEFRKKRSQRPSRCSNPTPGPSGGVQVETISP | | |
| | GDGRTFPKRGQTCVVHYTGMLGDGKKVDSSRDRNKPF | | |
| | KFMLGKQEVIRGWEEGVAQMSVGQGAKLTISPDYAYG | | |
| | ATGHPGIIPPHATLVFDVELLELE* | | |
| OT-FOXP3- | MPNPRPGKPSAPSLALGPSPGASPSWRAAPKASDLLG | 1167 | 5738 |
| 010 (FoxP3 | ARGPGGTFQGRDLRGGAHASSSSLNPMPPSQLQLSTV | | |
| Delta 2- | DAHARTPVLQVHPLESPAMISLTPPTTATGVFSLKAR | | |
| Linker (SG)- | PGLPPGINVASLEWVSREPALLCTFPNPSAPRKDSTL | | |
| ecDHFR | SAVPQSSYPLLANGVCKWPGCEKVFEEPEDFLKHCQA | | |
| (Amino acid | DHLLDEKGRAQCLLQREMVQSLEQQLVLEKEKLSAMQ | | |
| 2-159 of WT) | AHLAGKMALTKASSVASSDKGSCCIVAAGSQGPVVPA | | |
| (R12Y, | WSGPREAPDSLFAVRRHLWGSHGNSTFPEFLHNMDYF | | |
| Y1001)-stop) | KFHNMRPPFTYATLIRWAILEAPEKQRTLNEIYHWFT | | |
| | RMFAFFRNHPATWKNAIRHNLSLHKCFVRVESEKGAV | | |
| | WTVDELEFRKKRSQRPSRCSNPTPGPSGISLIAALAV | | |
| | DYVIGMENAMPWNLPADLAWFKRNTLNKPVIMGRHTW | | |
| | ESIGRPLPGRKNIILSSQPGTDDRVTWVKSVDEAIAA | | |
| | CGDVPEIMVIGGGRVIEQFLPKAQKLYLTHIDAEVEG | | |
| | DTHFPDYEPDDWESVFSEFHDADAQNSHSYCFEILER | | |
| | R* | | |

[0667] In some embodiments, the SREs of the present invention may be used to achieve pulsatile expression of the compositions of the invention. As used here, “pulsatile” refers to a plurality of payload expression at spaced apart time intervals. Generally, upon administration of the stimulus, the expression of the payload is increased causing the first pulse; following the withdrawal of the stimulus, the expression of the payload decreases and this represents the interval time between the first exposure and the next exposure to the stimulus, after which the second exposure to the stimulus is initiated. Compositions of the invention may be used in varying doses to avoid T cell energy, prevent cytokine release syndrome and minimize toxicity associated with immunotherapy. For example, low doses of the compositions of the present invention may be used to initially treat patients with high tumor burden, while patients with low tumor burden may be treated with high and repeated doses of the compositions of the invention to ensure recognition of a minimal tumor antigen load. In another instance, the compositions of the present invention may be delivered in a pulsatile fashion to reduce tonic T cell signaling and enhance persistence in vivo. In some aspects, toxicity may be minimized by initially using low doses of the compositions of the invention, prior to administering high doses. Dosing may be modified if serum markers such as ferritin, serum C-reactive protein, IL6, IFN-7, and TNF-α are elevated. Doses for pulsatile expression may be spaced apart in time intervals measured in seconds, hours, days, or months.

### 5. Genomic Editing Systems

[0668] In some embodiments, payloads of the present invention may be components of gene editing systems including a CRISPR (Clustered Regularly Interspaced Short Palindromic Repeats), CRISPR enzyme (Cas9), CRISPR-Cas9 or CRISPR system and CRISPR-CAS9 complex. It may also be other genomic editing systems, such as Zinc finger nucleases, TALEN (Transcription activator-like effector-based nucleases) and meganucleases.

### Additional Features

[0669] The effector module of the present invention may further comprise a signal sequence which regulates the distribution of the payload of interest, a cleavage and/or processing feature which facilitate cleavage of the payload from the effector module construct, a targeting and/or penetrating signal which can regulate the cellular localization of the effector module, a tag, and/or one or more linker sequences which link different components (e.g. a DD and a payload) of the effector module.

### 1. Signal Sequences

[0670] In addition to the SRE (e.g., DD) and payload region, effector modules of the invention may further comprise one or more signal sequences. Signal sequences (sometimes referred to as signal peptides, targeting signals, target peptides, localization sequences, transit peptides, leader sequences or leader peptides) direct proteins (e.g., the effector module of the present invention) to their designated cellular and/or extracellular locations. Protein signal sequences play a central role in the targeting and translocation of nearly all secreted proteins and many integral membrane proteins.

[0671] A signal sequence is a short (5-30 amino acids long) peptide present at the N-terminus of the majority of newly synthesized proteins that are destined towards a particular location. Signal sequences can be recognized by signal recognition particles (SRPs) and cleaved using type I and type II signal peptide peptidases. Signal sequences derived from human proteins can be incorporated as a regulatory module of the effector module to direct the effector module to a particular cellular and/or extracellular location. These signal sequences are experimentally verified and can be cleaved (Zhang et al., Protein Sci. 2004, 13:2819-2824).

[0672] In some embodiments, a signal sequence may be, although not necessarily, located at the N-terminus or C-terminus of the effector module, and may be, although not necessarily, cleaved off the desired effector module to yield a “mature” payload, i.e., an immunotherapeutic agent as discussed herein.

[0673] In some examples, a signal sequence may be a secreted signal sequence derived from a naturally secreted protein, and its variant thereof. In some instances, the secreted signal sequences may be cytokine signal sequences such as, but not limited to, IL2 signal sequence comprising amino acid of SEQ ID NO. 2956, encoded by the nucleotide of SEQ ID NOs. 5739-5742 and/or p40 signal sequence comprising the amino acid sequence of SEQ ID NO. 2219, encoded by the nucleotide of SEQ ID NOs. 2219-2229 or a GMCSF leader sequence comprising the amino acid sequence of SEQ ID NOs. 5758-5760.

[0674] In some examples, a signal sequence may be a secreted signal sequence derived from a naturally secreted protein, and its variant thereof. In some instances, the secreted signal sequences may be cytokine signal sequences such as, but not limited to, IL2 signal sequence comprising amino acid of SEQ. ID NO. 2801, encoded by the nucleotide of SEQ. ID NO. 1561-5764 and/or p40 signal sequence comprising the amino acid sequence of SEQ. ID NO. 5765, encoded by the nucleotide of SEQ. ID NO. 5766-5774.

[0675] In some examples, a signal sequence may be a secreted signal sequence derived from a naturally secreted protein, and its variant thereof. In some instances, the secreted signal sequences may be cytokine signal sequences such as, but not limited to, IL2 signal sequence (amino acid of SEQ ID NO. 2776, encoded by the nucleic acid sequence of SEQ ID NO. 5775, 5776 and/or 5777, 5778), p40 signal sequence (amino acid sequence of SEQ ID NO. 5779, encoded by the nucleic acid sequence of SEQ ID NO. 5780-5788), or a GMCSF leader sequence (SEQ ID NO. 2762 (encoded by SEQ ID NO. 5789), 5790, 5791).

[0676] In some instances, signal sequences directing the payload to the surface membrane of the target cell may be used. Expression of the payload on the surface of the target cell may be useful to limit the diffusion of the payload to non-target in vivo environments, thereby potentially improving the safety profile of the payloads. Additionally, the membrane presentation of the payload may allow for physiologically and qualitative signaling as well as stabilization and recycling of the payload for a longer half-life. Membrane sequences may be the endogenous signal sequence of the N terminal component of the payload. Optionally, it may be desirable to exchange this sequence for a different signal sequence. Signal sequences may be selected based on their compatibility with the secretory pathway of the cell type of interest so that the payload is presented on the surface of the T cell. In some embodiments, the signal sequence may be IgE signal sequence comprising amino acid SEQ ID NO. 2957 and nucleotide sequence of SEQ ID NO. 5792, a CD8a signal sequence comprising amino acid SEQ ID NO. 1320 and nucleotide sequence of SEQ ID NOs. 5793-5797, 5798-5800 or an IL15Ra signal sequence, comprising amino acid SEQ ID NO. 5801 encoded by SEQ ID NO. 5802.

[0677] In some instances, signal sequences directing the payload of interest to the surface membrane of the target cell may be used. Expression of the payload on the surface of the target cell may be useful to limit the diffusion of the payload to non-target in vivo environments, thereby potentially improving the safety profile of the payloads. Additionally, the membrane presentation of the payload may allow for physiologically and qualitative signaling as well as stabilization and recycling of the payload for a longer half-life. Membrane sequences may be the endogenous signal sequence of the N terminal component of the payload of interest. Optionally, it may be desirable to exchange this sequence for a different signal sequence. Signal sequences may be selected based on their compatibility with the secretory pathway of the cell type of interest so that the payload is presented on the surface of the T cell. In some embodiments, the signal sequence may be IgE signal sequence comprising amino acid SEQ. ID NO. 2802 and nucleotide sequence of SEQ. ID NO. 5803, 5804, or 5805, an IL15Ra signal sequence comprising amino acid SEQ. ID NO. 2882 and nucleotide sequence of SEQ. ID NO. 5806, or CD8a signal sequence (also referred to as CD8a leader) comprising amino acid SEQ. ID NO. 5807 and nucleotide sequence of SEQ. ID NO. 5808-5812.

[0678] In some instances, signal sequences directing the payload of interest to the surface membrane of the target cell may be used. Expression of the payload on the surface of the target cell may be useful to limit the diffusion of the payload to non-target in vivo environments, thereby potentially improving the safety profile of the payloads. Additionally, the membrane presentation of the payload may allow for physiologically and qualitative signaling as well as stabilization and recycling of the payload for a longer half-life. Membrane sequences may be the endogenous signal sequence of the N terminal component of the payload of interest. Optionally, it may be desirable to exchange this sequence for a different signal sequence. Signal sequences may be selected based on their compatibility with the secretory pathway of the cell type of interest so that the payload is presented on the surface of the T cell. In some embodiments, the signal sequence may be IgE signal sequence (amino acid SEQ ID NO. 5813 and nucleotide sequence of SEQ ID NO. 5814), CD8a signal sequence (also referred to as CD8a leader) (amino acid SEQ ID NO. 2766 and nucleotide sequence of SEQ ID NO. 5815-5819, and/or 5820) or an IL15Ra signal sequence (amino acid SEQ ID NO. 5821, encoded by SEQ ID NO. 5822).

[0679] Other examples of signal sequences include, a variant may be a modified signal sequence discussed in U.S. Pat. Nos. 8,148,494, 8,258,102, 9,133,265, 9,279,007, and U.S. Patent Application Publication No. 2007/0141666; and International Patent Publication NO. WO1993/018181; the contents of each of which are incorporated herein by reference in their entirety. In other examples, a signal sequence may be a heterogeneous signal sequence from other organisms such as virus, yeast and bacteria, which can direct an effector module to a particular cellular site, such as a nucleus (e.g., EP 1209450). Other examples may include Aspartic Protease (NSP24) signal sequences from Trichoderma that can increase secretion of fused protein such as enzymes (e.g., U.S. Pat. No. 8,093,016 to Cervin and Kim), bacterial lipoprotein signal sequences (e.g., International Patent Publication NO. WO1991/09952 to Lau and Rioux), E. coli enterotoxin II signal peptides (e.g., U.S. Pat. No. 6,605,697 to Kwon et al.), E. coli secretion signal sequence (e.g., U.S. Patent Publication NO. 2016/090404 to Malley et al.), a lipase signal sequence from a methylotrophic yeast (e.g., U.S. Pat. No. 8,975,041), and signal peptides for DNases derived from Coryneform bacteria (e.g., U.S. Pat. No. 4,965,197); the contents of each of which are incorporated herein by reference in their entirety.

[0680] Signal sequences may also include nuclear localization signals (NLSs), nuclear export signals (NESs), polarized cell tubulo-vesicular structure localization signals (See, e.g., U.S. Pat. No. 8,993,742; Cour et al., Nucleic Acids Res. 2003, 31(1): 393-396; the contents of each of which are incorporated herein by reference in their entirety), extracellular localization signals, signals to subcellular locations (e.g. lysosome, endoplasmic reticulum, golgi, mitochondria, plasma membrane and peroxisomes, etc.) (See, e.g., U.S. Pat. No. 7,396,811; and Negi et al., Database, 2015, 1-7; the contents of each of which are incorporated herein by reference in their entirety).

[0681] In some embodiments, signal sequences of the present invention, include without limitation, any of those taught in Tables 6 or 7 of copending commonly owned U.S. Provisional Patent Application No. 62/320,864 filed on Apr. 11, 2016 or in U.S. Provisional Application No. 62/466,596 filed Mar. 3, 2017 and the International Publication WO2017/180587, the contents of each of which are incorporated herein by reference in their entirety.

[0682] In some examples, a signal sequence may be a secreted signal sequence derived from a naturally secreted protein, and its variant thereof. In some instances, the secreted signal sequences may be cytokine signal sequences such as, but not limited to, IL2 signal sequence comprising amino acid of SEQ ID NO: 2793, encoded by the nucleotide of SEQ ID NO: 5823-5826 and/or p40 signal sequence comprising the amino acid sequence of SEQ ID NO: 2748, encoded by the nucleotide of SEQ ID NO: 5827-5835.

[0683] In some instances, signal sequences directing the payload of interest to the surface membrane of the target cell may be used. Expression of the payload on the surface of the target cell may be useful to limit the diffusion of the payload to non-target in vivo environments, thereby potentially improving the safety profile of the payloads. Additionally, the membrane presentation of the payload may allow for physiologically and qualitative signaling as well as stabilization and recycling of the payload for a longer half-life. Membrane sequences may be the endogenous signal sequence of the N terminal component of the payload of interest. Optionally, it may be desirable to exchange this sequence for a different signal sequence. Signal sequences may be selected based on their compatibility with the secretory pathway of the cell type of interest so that the payload is presented on the surface of the T cell. In some embodiments, the signal sequence may be IgE signal sequence comprising amino acid SEQ ID NO: 2794 and nucleotide sequence of SEQ ID NO: 5836, 5837, or 5838, CD8a signal sequence (also referred to as CD8a leader) comprising amino acid SEQ ID NO: 2747 and nucleotide sequence of SEQ ID NO: 5839-5843, or IL15Ra signal sequence (also referred to as IL15Ra leader) comprising amino acid SEQ ID NO: 2815 and nucleotide sequence of SEQ ID NO: 5844.

[0684] Other examples of signal sequences include, a variant may be a modified signal sequence discussed in U.S. Pat. Nos. 8,148,494; 8,258,102; 9,133,265; 9,279,007; and U.S. patent application publication NO.: 20070141666; and International patent application publication NO.: WO1993018181; the contents of each of which are incorporated herein by reference in their entirety.

[0685] In other examples, a signal sequence may be a heterogeneous signal sequence from other organisms such as virus, yeast and bacteria, which can direct an effector module to a particular cellular site, such as a nucleus (e.g., EP 1209450). Other examples may include Aspartic Protease (NSP24) signal sequences from Trichoderma that can increase secretion of fused protein such as enzymes (e.g., U.S. Pat. No. 8,093,016 to Cervin and Kim), bacterial lipoprotein signal sequences (e.g., PCT application publication NO.: WO199109952 to Lau and Rioux), E. coli enterotoxin II signal peptides (e.g., U.S. Pat. No. 6,605,697 to Kwon et al.), E. coli secretion signal sequence (e.g., U.S. patent publication NO.: US2016090404 to Malley et al.), a lipase signal sequence from a methylotrophic yeast (e.g., U.S. Pat. No. 8,975,041), and signal peptides for DNases derived from Coryneform bacteria (e.g., U.S. Pat. No. 4,965,197); the contents of each of which are incorporated herein by reference in their entirety.

[0686] Signal sequences may also include nuclear localization signals (NLSs), nuclear export signals (NESs), polarized cell tubulo-vesicular structure localization signals (See, e.g., U.S. Pat. No. 8,993,742; Cour et al., Nucleic Acids Res. 2003, 31(1): 393-396; the contents of each of which are incorporated herein by reference in their entirety), extracellular localization signals, signals to subcellular locations (e.g. lysosome, endoplasmic reticulum, golgi, mitochondria, plasma membrane and peroxisomes, etc.) (See, e.g., U.S. Pat. No. 7,396,811; and Negi et al., Database, 2015, 1-7; the contents of each of which are incorporated herein by reference in their entirety).

[0687] In some embodiments, signal sequences of the present invention, include without limitation, any of those taught in Tables 6 or 7 of copending commonly owned U.S. Provisional Patent Application No. 62/320,864 filed on Apr. 11, 2016, or in U.S. Provisional Application No. 62/466,596 filed Mar. 3, 2017 and the International Publication WO2017/180587, the contents of each of which are incorporated herein by reference in their entirety.

[0688] In some embodiments, signal sequences of the present invention, include without limitation, any of those taught in Table 7 of copending commonly owned U.S. Provisional Patent Application No. 62/320,864, filed on Apr. 11, 2016, or in U.S. Provisional Application No. 62/466,596 filed Mar. 3, 2017 and the International Publication WO2017/180587, the contents of which are incorporated herein by reference in their entirety.

[0689] In addition to the SRE (e.g., DD) and payload region, effector modules of the invention may further comprise one or more signal sequences. Signal sequences (sometimes referred to as signal peptides, targeting signals, target peptides, localization sequences, transit peptides, leader sequences or leader peptides) direct proteins (e.g., the effector module of the present invention) to their designated cellular and/or extracellular locations. Protein signal sequences play a central role in the targeting and translocation of nearly all secreted proteins and many integral membrane proteins.

### Protein Tags

[0690] In some embodiments, the effector module of the invention may comprise a protein tag. The protein tag may be used for detecting and monitoring the process of the effector module. The effector module may include one or more tags such as an epitope tag (e.g., a FLAG or hemagglutinin (HA) tag). A large number of protein tags may be used for the present effector modules. They include, but are not limited to, self-labeling polypeptide tags (e.g., haloalkane dehalogenase (halotag2 or halotag7), ACP tag, clip tag, MCP tag, snap tag), epitope tags (e.g., FLAG, HA, His, and Myc), fluorescent tags (e.g., green fluorescent protein (GFP), red fluorescent protein (RFP), yellow fluorescent protein (YFP), and its variants), bioluminescent tags (e.g. luciferase and its variants), affinity tags (e.g., maltose-binding protein (MBP) tag, glutathione-S-transferase (GST) tag), immunogenic affinity tags (e.g., protein A/G, IRS, AU1, AU5, glu-glu, KT3, S-tag, HSV, VSV-G, Xpress and V5), and other tags (e.g., biotin (small molecule), StrepTag (StrepII), SBP, biotin carboxyl carrier protein (BCCP), eXact, CBP, CYD, HPC, CBD intein-chitin binding domain, Trx, NorpA, and NusA.

[0691] In other embodiments, a tag may also be selected from those disclosed in U.S. Pat. Nos. 8,999,897; 8,357,511; 7,094, 568; 5,011,912; 4,851,341; and 4,703,004; U.S. patent application publication NOs.: US2013115635 and US2013012687; and International application publication NO.: WO2013091661; the contents of each of which are incorporated herein by reference in their entirety.

[0692] In some aspects, a multiplicity of protein tags, either the same or different tags, may be used; each of the tags may be located at the same N- or C-terminus, whereas in other cases these tags may be located at each terminus.

[0693] In some embodiments, protein tags of the present invention, include without limitation, any of those taught in Table 8 of copending commonly owned U.S. Provisional Patent Application No. 62/320,864 filed on Apr. 11, 2016, or in U.S. Provisional Application No. 62/466,596 filed Mar. 3, 2017 and the International Publication WO2017/180587, the contents of each of which are incorporated herein by reference in their entirety.

### 2. Cleavage Sites

[0694] In some embodiments, the effector module comprises a cleavage and/or processing feature. The effector module of the present invention may include at least one protein cleavage signal/site. The protein cleavage signal/site may be located at the N-terminus, the C-terminus, at any space between the N- and the C-termini such as, but not limited to, half-way between the N- and C-termini, between the N-terminus and the half-way point, between the half-way point and the C-terminus, and combinations thereof.

[0695] The effector module may include one or more cleavage signal(s)/site(s) of any proteinases. The proteinases may be a serine proteinase, a cysteine proteinase, an endopeptidase, a dipeptidase, a metalloproteinase, a glutamic proteinase, a threonine proteinase and an aspartic proteinase. In some aspects, the cleavage site may be a signal sequence of furin, actinidain, calpain-1, carboxypeptidase A, carboxypeptidase P, carboxypeptidase Y, caspase-1, caspase-2, caspase-3, caspase-4, caspase-5, caspase-6, caspase-7, caspase-8, caspase-9, caspase-10, cathepsin B, cathepsin C, cathepsin G, cathepsin H, cathepsin K, cathepsin L, cathepsin S, cathepsin V, clostripain, chymase, chymotrypsin, elastase, endoproteinase, enterokinase, factor Xa, formic acid, granzyme B, Matrix metallopeptidase-2, Matrix metallopeptidase-3, pepsin, proteinase K, SUMO protease, subtilisin, TEV protease, thermolysin, thrombin, trypsin and TAGZyme.

[0696] In one embodiment, the cleavage site is a furin cleavage site comprising the amino acid sequence SARNRQKRS (SEQ ID NO. 2984), encoded by nucleotide sequence of SEQ ID NO. 5845), or a revised furin cleavage site comprising the amino acid sequence ARNRQKRS (SEQ ID NO. 2985), encoded by nucleotide sequence of SEQ ID NO. 5846); or a modified furin site comprising the amino acid sequence ESRRVRRNKRSK (SEQ ID NO. 3079), encoded by nucleotide sequence of SEQ ID NO. 5847-5849); or a SGESRRVRRNKRSK (SEQ ID NO. 2986), encoded by the nucleotide sequence of SEQ ID NO. 5850. In some instances, the cleavage site is a P2A cleavage site, ATNFSLLKQAGDVEENPGP (SEQ ID NO. 2987), encoded by SEQ ID NO. 5851, wherein NPGP (SEQ ID NO. 2988) is the P2A site.

[0697] In one embodiment, the cleavage site is a furin cleavage site comprising the amino acid sequence SARNRQKRS (SEQ ID NO. 2989), encoded by nucleotide sequence of SEQ ID NO. 5852; or a revised furin cleavage site comprising the amino acid sequence ARNRQKRS (SEQ ID NO. 2990), encoded by nucleotide sequence of SEQ ID NO. 5853; modified furin site comprising the amino acid sequence ESRRVRRNKRSK (SEQ ID NO. 3083), encoded by nucleotide sequence of SEQ ID NO. 5854-5856; or a SGESRRVRRNKRSK (SEQ ID NO. 2991), encoded by the nucleotide sequence of SEQ ID NO. 5857. In some instances, the cleavage site is a P2A cleavage site ATNFSLLKQAGDVEENPGP (SEQ ID NO. 2992), encoded by SEQ ID NO. 5858, or GATNFSLLKQAGDVEENPGP (SEQ ID NO. 2993), encoded by SEQ ID NO. 5859), wherein NPGP (SEQ ID NO. 2994) is the P2A site.

[0698] In one embodiment, the cleavage site is a furin cleavage site comprising the amino acid sequence SARNRQKRS (SEQ. ID NO. 2995), encoded by nucleotide sequence of SEQ. ID NO. 5860; or a revised furin cleavage site comprising the amino acid sequence ARNRQKRS (SEQ. ID NO. 2996), encoded by nucleotide sequence of SEQ. ID NO. 5861; or a modified furin site comprising the amino acid sequence ESRRVRRNKRSK (SEQ. ID NO. 2997), encoded by nucleotide sequence of SEQ. ID NO. 5862-5864.

[0699] In some embodiments, cleavage sites of the present invention, include without limitation, any of those taught in Table 7 of copending commonly owned U.S. Provisional Patent Application No. 62/320,864 filed on Apr. 11, 2016 or in U.S. Provisional Application No. 62/466,596 filed Mar. 3, 2017 and the International Publication WO2017/180587, the contents of each of which are incorporated herein by reference in their entirety.

### 3. Protein Tags

[0700] In some embodiments, the effector module of the invention may comprise a protein tag. The protein tag may be used for detecting and monitoring the process of the effector module. The effector module may include one or more tags such as an epitope tag (e.g., a FLAG or hemagglutinin (HA) tag). A large number of protein tags may be used for the present effector modules. They include, but are not limited to, self-labeling polypeptide tags (e.g., haloalkane dehalogenase (halotag2 or halotag7), ACP tag, clip tag, MCP tag, snap tag), epitope tags (e.g., FLAG, HA, His, and Myc), fluorescent tags (e.g., green fluorescent protein (GFP), red fluorescent protein (RFP), yellow fluorescent protein (YFP), and its variants), bioluminescent tags (e.g. luciferase and its variants), affinity tags (e.g., maltose-binding protein (MBP) tag, glutathione-S-transferase (GST) tag), immunogenic affinity tags (e.g., protein A/G, IRS, AU1, AU5, glu-glu, KT3, S-tag, HSV, VSV-G, Xpress and V5), and other tags (e.g., biotin (small molecule), StrepTag (StrepII), SBP, biotin carboxyl carrier protein (BCCP), eXact, CBP, CYD, HPC, CBD intein-chitin binding domain, Trx, NorpA, and NusA.

[0701] In other embodiments, a tag may also be selected from those disclosed in U.S. Pat. Nos. 8,999,897, 8,357,511, 7,094,568, 5,011,912, 4,851,341, and 4,703,004; U.S. Patent Application Publication NOs. 2013/115635 and 2013/012687; and International Patent Publication NO. WO2013/091661; the contents of each of which are incorporated herein by reference in their entirety.

[0702] In other embodiments, a tag may also be selected from those disclosed in U.S. Pat. Nos. 8,999,897; 8,357,511; 7,094, 568; 5,011,912; 4,851,341; and 4,703,004; U.S. patent application publication NOs. US2013115635 and US2013012687; and International application publication NOS. WO2013091661; the contents of each of which are incorporated herein by reference in their entirety.

[0703] In some aspects, a multiplicity of protein tags, either the same or different tags, may be used; each of the tags may be located at the same N- or C-terminus, whereas in other cases these tags may be located at each terminus.

[0704] In one embodiment, the protein tag is an HA tag. A non-limiting example of an HA tag is YPYDVPDYA (SEQ ID NO. 2998, encoded by SEQ ID NO. 5865, 5866, and/or 5867).

[0705] In some embodiments, protein tags of the present invention, include without limitation, any of those taught in Table 8 of copending commonly owned U.S. Provisional Patent Application No. 62/320,864 filed on Apr. 11, 2016 or in U.S. Provisional Application No. 62/466,596 filed Mar. 3, 2017 and the International Publication WO2017/180587, the contents of each of which are incorporated herein by reference in their entirety.

### 4. Targeting Peptides

[0706] In some embodiments, the effector module of the invention may further comprise a targeting and/or penetrating peptide. Small targeting and/or penetrating peptides that selectively recognize cell surface markers (e.g. receptors, trans-membrane proteins, and extra-cellular matrix molecules) can be employed to target the effector module to the desired organs, tissues or cells. Short peptides (5-50 amino acid residues) synthesized in vitro and naturally occurring peptides, or analogs, variants, derivatives thereof, may be incorporated into the effector module for homing the effector module to the desired organs, tissues and cells, and/or subcellular locations inside the cells.

[0707] In some embodiments, a targeting sequence and/or penetrating peptide may be included in the effector module to drive the effector module to a target organ, or a tissue, or a cell (e.g., a cancer cell). In other embodiments, a targeting and/or penetrating peptide may direct the effector module to a specific subcellular location inside a cell.

[0708] A targeting peptide has any number of amino acids from about 6 to about 30 inclusive. The peptide may have 6, 7, 8, 9, 10, 11, 12, 13, 14, 15, 16, 17, 18, 19, 20, 21, 22, 23, 24, 25, 26, 27, 28, 29 or 30 amino acids. Generally, a targeting peptide may have 25 or fewer amino acids, for example, 20 or fewer, for example 15 or fewer.

[0709] Exemplary targeting peptides may include, but are not limited to, those disclosed in the art, e.g., U.S. Pat. Nos. 9,206,231, 9,110,059, 8,706,219, and 8,772,449; and U.S. Patent Application Publication Nos. 2016/089447, 2016/060296, 2016/060314, 2016/060312, 2016/060311, 2016/009772, 2016/002613, 2015/314011 and 2015/166621; and International Patent Publication Nos. WO2015/179691 and WO2015/183044; the contents of each of which are incorporated herein by reference in their entirety. In some embodiments, targeting peptides of the present invention, include without limitation, any of those taught in Table 9 of copending commonly owned U.S. Provisional Patent Application No. 62/320,864 filed on Apr. 11, 2016 or in U.S. Provisional Application No. 62/466,596 filed Mar. 3, 2017 and the International Publication WO2017/180587, the contents of each of which are incorporated herein by reference in their entirety.

### 5. Linkers

[0710] In some embodiments, the effector module of the invention may further comprise a linker sequence. The linker region serves primarily as a spacer between two or more polypeptides within the effector module. The “linker” or “spacer”, as used herein, refers to a molecule or group of molecules that connects two molecules, or two parts of a molecule such as two domains of a recombinant protein.

[0711] In some embodiments, “Linker” (L) or “linker domain” or “linker region” or “linker module” or “peptide linker” as used herein refers to an oligo- or polypeptide region of from about 1 to 100 amino acids in length, which links together any of the domains/regions of the effector module (also called peptide linker). The peptide linker may be 1-40 amino acids in length, or 2-30 amino acids in length, or 20-80 amino acids in length, or 50-100 amino acids in length. Linker length may also be optimized depending on the type of payload utilized and based on the crystal structure of the payload. In some instances, a shorter linker length may be preferably selected. In some aspects, the peptide linker is made up of amino acids linked together by peptide bonds, preferably from 1 to 20 amino acids linked by peptide bonds, wherein the amino acids are selected from the 20 naturally occurring amino acids: Glycine (G), Alanine (A), Valine (V), Leucine (L), Isoleucine (I), Serine (S), Cysteine (C), Threonine (T), Methionine (M), Proline (P), Phenylalanine (F), Tyrosine (Y), Tryptophan (W), Histidine (H), Lysine (K), Arginine (R), Aspartate (D), Glutamic acid (E), Asparagine (N), and Glutamine (Q). One or more of these amino acids may be glycosylated, as is understood by those in the art. In some aspects, amino acids of a peptide linker may be selected from Alanine (A), Glycine (G), Proline (P), Asparagine (R), Serine (S), Glutamine (Q) and Lysine (K).

[0712] In one example, an artificially designed peptide linker may preferably be composed of a polymer of flexible residues like Glycine (G) and Serine (S) so that the adjacent protein domains are free to move relative to one another. Longer linkers may be used when it is desirable to ensure that two adjacent domains do not interfere with one another. The choice of a particular linker sequence may concern if it affects biological activity, stability, folding, targeting and/or pharmacokinetic features of the fusion construct. Examples of peptide linkers include, but are not limited to. SG, MH, GGSG (SEQ ID NO. 2999; encoded by the nucleotide sequence SEQ ID NO. 5868), GGSGG (SEQ ID NO. 3078; encoded by any of the nucleotide sequences SEQ ID NO. 5869-5873), GGSGGG (SEQ ID NO. 1183; encoded by any of the nucleotide sequences SEQ ID NO. 5874-5875), SGGGS (SEQ ID NO. 2971; encoded by the nucleotide sequence SEQ ID NO. 5876), GGSGGGSGG (SEQ ID NO. 3038; encoded by the nucleotide sequence SEQ ID NO. 5877), GGGGG (SEQ ID NO. 3000), GGGGS (SEQ ID NO. 3002) or (GGGGS)n (n=1 (SEQ ID NO. 3002), 2 (SEQ ID NO. 3003), 3 (SEQ ID NO. 3004), 4 (SEQ ID NO. 3005), 5 (SEQ ID NO 3006), or 6 (SEQ ID NO. 3007)), SSSSG (SEQ ID NO. 3008) or (SSSSG)n (n=1 (SEQ ID NO. 3008), 2 (SEQ ID NO. 3009), 3 (SEQ ID NO. 3010), 4 (SEQ ID NO. 3011), 5 (SEQ ID NO. 3012), or 6 (SEQ ID NO. 3013)), SGGGSGGGGSGGGGSGGGGSGGGSLQ (SEQ ID NO. 2960; encoded by the nucleotide sequence SEQ ID NO. 5878), EFSTEF (SEQ ID NO. 3014 encoded by any of the nucleotide sequences SEQ ID NO. 5879-5880), SGGGS (SEQ ID NO. 3015; encoded by the nucleotide sequence SEQ ID NO. 5881), GKSSGSGSESKS (SEQ ID NO. 3016), GGSTSGSGKSSEGKG (SEQ ID NO. 3017), GSTSGSGKSSSEGSGSTKG (SEQ ID NO. 3018), GSTSGSGKPGSGEGSTKG (SEQ ID NO. 3019), VDYPYDVPDYALD (SEQ ID NO. 3020; encoded by nucleotide sequence SEQ ID NO. 5882), EGKSSGSGSESKEF (SEQ ID NO. 3021), SG3-(SG4)3-SG3-SLQ-YPYDVPDYA (SEQ ID NO. 3022), encoded by the nucleotide sequence of SEQ ID NO. 5883; DYKDDDDK (SEQ ID NO. 3023), encoded by the nucleotide sequence of SEQ ID NO. 5884; SG3-(SG4)5-SG3-S(SEQ ID NO. 3024), encoded by SEQ ID NO. 5885; GGGGSGGGGSGGGGS (SEQ ID NO. 2962), encoded by SEQ ID NO. 5886-5891; SGGGSGGGGSGGGGSGGGGSYPYDVPDYASGGGS (SEQ ID NO. 3025), encoded by SEQ ID NO. 5892; GSGATNFSLLKQAGDVEENPGP (SEQ ID NO. 3026), encoded by SEQ ID NO. 5893; or SGGGGSGGGGSGGGGSGGGSLQ (SEQ ID NO. 3027).

[0713] In one example, an artificially designed peptide linker may preferably be composed of a polymer of flexible residues like Glycine (G) and Serine (S) so that the adjacent protein domains are free to move relative to one another. Longer linkers may be used when it is desirable to ensure that two adjacent domains do not interfere with one another. The choice of a particular linker sequence may concern if it affects biological activity, stability, folding, targeting and/or pharmacokinetic features of the fusion construct. Examples of peptide linkers include, but are not limited to: SGGGSGGGGSGGGGSGGGGSGGGGSGGGGSGGGS (SEQ. ID NO. 2885; encoded by SEQ. ID NO. 5894), EGKSSGSGSESKEF (SEQ ID NO. 3028), SG3-(SG4)3-SG3-SLQ-YPYDVPDYA (SEQ ID NO. 3029), encoded by the nucleotide sequence of SEQ ID NO. 5895; DYKDDDDK (SEQ ID NO. 3030), encoded by the nucleotide sequence of SEQ ID NO. 5896; SG3-(SG4)5-SG3-S(SEQ ID NO. 3031), encoded by SEQ ID NO. 5897; SGGGSGGGGSGGGGSGGGGSYPYDVPDYASGGGS (SEQ ID NO. 3033), encoded by SEQ ID NO. 5898; GSGATNFSLLKQAGDVEENPGP (SEQ ID NO. 3034), encoded by SEQ ID NO. 5899; SGGGSGGGGSGGGGSGGGGS (SEQ. ID NO. 2886; encoded by SEQ. ID NO. 5900), encoded by the nucleotide sequence of SEQ ID NO. 5901; QLIGMLQGLMRDL (SEQ ID NO. 3082), encoded by SEQ ID NO. 5902; ASFE (SEQ ID NO. 2763), encoded by SEQ ID NO. 5903; GS (encoded by GGTTCC), SG (encoded by AGCGGC), EF (encoded by GAGTTC), TS (encoded by ACTAGT), HM (encoded by CACATG), MH (encoded by ATGCAC) or GSG (encoded by GGATCCGGA or GGATCCGGT).

[0714] In one example, an artificially designed peptide linker may preferably be composed of a polymer of flexible residues like Glycine (G) and Serine (S) so that the adjacent protein domains are free to move relative to one another. Longer linkers may be used when it is desirable to ensure that two adjacent domains do not interfere with one another. The choice of a particular linker sequence may concern if it affects biological activity, stability, folding, targeting and/or pharmacokinetic features of the fusion construct. Examples of peptide linkers include, but are not limited to: MH, SG, GGSG (SEQ ID NO. 3035; encoded by the nucleotide sequence SEQ ID NO. 5904), GGSGG (SEQ ID NO. 3036; encoded by any of the nucleotide sequences SEQ ID NO. 5905-5909), GGSGGG (SEQ ID NO. 3037; encoded by any of the nucleotide sequences SEQ ID NO. 5910-5911), SGGGS (SEQ ID NO. 2977; encoded by the nucleotide sequence SEQ ID NO. 5912, 5913, 5914), GGSGGGSGG (SEQ ID NO. 3038; encoded by the nucleotide sequence SEQ ID NO. 5915), GGGGG (SEQ ID NO. 3039), GGGGS (SEQ ID NO. 3040) or (GGGGS)n (n=1 (SEQ ID NO. 3040), 2 (SEQ ID NO. 3041), 3 (SEQ ID NO. 3042, encoded by 5916, 5917, 5918, 5919, 5920, 5921), 4 (SEQ ID NO. 3044), 5 (SEQ ID NO. 3045), or 6 (SEQ ID NO. 3046)), SSSSG (SEQ ID NO. 3047) or (SSSSG)n (n=1 (SEQ ID NO. 3047), 2 (SEQ ID NO. 3048), 3 (SEQ ID NO. 3049), 4 (SEQ ID NO. 3050), 5 (SEQ ID NO. 3051), or 6 (SEQ ID NO. 3052)), SGGGSGGGGSGGGGSGGGGSGGGSLQ (SEQ ID NO. 3043; encoded by the nucleotide sequence SEQ ID NO. 5922, 5923-5928), EFSTEF (SEQ ID NO. 2761; encoded by any of the nucleotide sequences SEQ ID NO. 5929, 5930), GKSSGSGSESKS (SEQ ID NO. 3053), GGSTSGSGKSSEGKG (SEQ ID NO. 3054), GSTSGSGKSSSEGSGSTKG (SEQ ID NO. 3055), GSTSGSGKPGSGEGSTKG (SEQ ID NO. 3056), VDYPYDVPDYALD (SEQ ID NO. 2976; encoded by nucleotide sequence SEQ ID NO. 5931), EGKSSGSGSESKEF (SEQ ID NO. 3028), SG3-(SG4)3-SG3-SLQ-YPYDVPDYA (SEQ ID NO. 3029), encoded by the nucleotide sequence of SEQ ID NO. 5932; DYKDDDDK (SEQ ID NO. 3030), encoded by the nucleotide sequence of SEQ ID NO. 5933; SG3-(SG4)5-SG3-S(SEQ ID NO. 3031), encoded by SEQ ID NO. 5934; SGGGSGGGGSGGGGSGGGGSYPYDVPDYASGGGS (SEQ ID NO. 3032), encoded by SEQ ID NO. 5935; GSGATNFSLLKQAGDVEENPGP (SEQ ID NO. 3034), encoded by SEQ ID NO. 5936; SGGGSGGGGSGGGGSGGGGS (SEQ ID NO. 3057), encoded by the nucleotide sequence of SEQ ID NO. 5937; QLIGMLQGLMRDL (SEQ ID NO. 3082), encoded by SEQ ID NO. 5938; ASFE (SEQ ID NO. 2763), encoded by SEQ ID NO. 5939; GS (encoded by GGTTCC), SG (encoded by AGCGGC), EF (encoded by GAGTTC), TS (encoded by ACTAGT), HM (encoded by CACATG), MH (encoded by ATGCAC) or GSG (encoded by GGATCCGGA or GGATCCGGT).

[0715] In other examples, a peptide linker may be made up of a majority of amino acids that are sterically unhindered, such as Glycine (G) and Alanine (A). Exemplary linkers are polyglycines (such as (G)₄ (SEQ ID NO. 3058), (G)₅ (SEQ ID NO. 3001), (G)₈ (SEQ ID NO. 3059)), poly(GA), and polyalanines. The linkers described herein are exemplary, and linkers that are much longer and which include other residues are contemplated by the present invention.

[0716] A linker sequence may be a natural linker derived from a multi-domain protein. A natural linker is a short peptide sequence that separates two different domains or motifs within a protein.

[0717] In some aspects, linkers may be flexible or rigid. In other aspects, linkers may be cleavable or non-cleavable. As used herein, the terms “cleavable linker domain or region” or “cleavable peptide linker” are used interchangeably. In some embodiments, the linker sequence may be cleaved enzymatically and/or chemically. Examples of enzymes (e.g., proteinase/peptidase) useful for cleaving the peptide linker include, but are not limited, to Arg-C proteinase, Asp-N endopeptidase, chymotrypsin, clostripain, enterokinase, Factor Xa, glutamyl endopeptidase, Granzyme B, Achromobacter proteinase I, pepsin, proline endopeptidase, proteinase K, Staphylococcal peptidase I, thermolysin, thrombin, trypsin, and members of the Caspase family of proteolytic enzymes (e.g. Caspases 1-10). Chemical sensitive cleavage sites may also be included in a linker sequence. Examples of chemical cleavage reagents include, but are not limited to, cyanogen bromide, which cleaves methionine residues; N-chloro succinimide, iodobenzoic acid or BNPS-skatole [2-(2-nitrophenylsulfenyl)-3-methylindole], which cleaves tryptophan residues; dilute acids, which cleave at aspartyl-prolyl bonds; and e aspartic acid-proline acid cleavable recognition sites (i.e., a cleavable peptide linker comprising one or more D-P dipeptide moieties). The fusion module may include multiple regions encoding peptides of interest separated by one or more cleavable peptide linkers.

[0718] In other embodiments, a cleavable linker may be a “self-cleaving” linker peptide, such as 2A linkers (for example T2A), 2A-like linkers or functional equivalents thereof and combinations thereof. In some embodiments, the linkers include the picornaviral 2A-like linker, CHYSEL sequences of porcine teschovirus (P2A), Thosea asigna virus (T2A) or combinations, variants and functional equivalents thereof. Other linkers will be apparent to those skilled in the art and may be used in connection with alternate embodiments of the invention.

[0719] As a non-limiting example, the P2A cleavable peptide may be GATNFSLLKQAGDVEENPGP (SEQ. ID NO. 2806; encoded by SEQ. ID NO. 5940).

[0720] In other embodiments, a cleavable linker may be a “self-cleaving” linker peptide, such as 2A linker (for example T2A), 2A-like linkers or functional equivalents thereof and combinations thereof. In some embodiments, the linkers include the picornaviral 2A-like linker, CHYSEL sequences of porcine teschovirus (P2A), Thosea asigna virus (T2A) or combinations, variants and functional equivalents thereof. In some embodiments, the biocircuits of the present invention may include 2A peptides. The 2A peptide is a sequence of about 20 amino acid residues from a virus that is recognized by a protease (2A peptidases) endogenous to the cell. The 2A peptide was identified among picornaviruses, a typical example of which is the Foot- and Mouth disease virus (Robertson B H, et. al., J Virol 1985, 54:651-660). 2A-like sequences have also been found in Picornaviridae like equine rhinitis A virus, as well as unrelated viruses such as porcine teschovirus-1 and the insect Thosea asigna virus (TaV). In such viruses, multiple proteins are derived from a large polyprotein encoded by an open reading frame. The 2A peptide mediates the co-translational cleavage of this polyprotein at a single site that forms the junction between the virus capsid and replication polyprotein domains. The 2A sequences contain the consensus motif D-V/I-E-X-N-P-G-P (SEQ ID NO. 3060 (where the second amino acid is V) or SEQ ID NO. 3084 (where the second amino acid is I)). These sequences are thought to act co-translationally, preventing the formation of a normal peptide bond between the glycine and last proline, resulting in the ribosome skipping of the next codon (Donnelly M L et al. (2001). J Gen Virol, 82:1013-1025). After cleavage, the short peptide remains fused to the C-terminus of the protein upstream of the cleavage site, while the proline is added to the N-terminus of the protein downstream of the cleavage site. Of the 2A peptides identified to date, four have been widely used namely FMDV 2A (abbreviated herein as F2A); equine rhinitis A virus (ERAV) 2A (E2A); porcine teschovirus-1 2A (P2A) and Thoseaasigna virus 2A (T2A). In some embodiments, the 2A peptide sequences useful in the present invention are selected from SEQ ID NO. 8-11 of International Patent Publication WO2010042490, the contents of which are incorporated by reference in its entirety.

[0721] The linkers of the present invention may also be non-peptide linkers. For example, alkyl linkers such as —NH—(CH₂)a-C(O), wherein a=2-20 can be used. These alkyl linkers may further be substituted by any non-sterically hindering group such as lower alkyl (e.g., C₁-C₆) lower acyl, halogen (e.g., Cl, Br), CN, NH₂, phenyl, etc.

[0722] In some aspects, the linker may be an artificial linker from U.S. Pat. No. 4,946,778; 5,525,491; 5,856,456; and International patent publication NOs.: WO2012/083424; the contents of each of which are incorporated herein by reference in their entirety.

[0723] In some embodiments, linkers of the present invention, include without limitation, any of those taught in Table 11 of copending commonly owned U.S. Provisional Patent Application No. 62/320,864 filed on Apr. 11, 2016, or in U.S. Provisional Application No. 62/466,596 filed Mar. 3, 2017 and the International Publication WO2017/180587, the contents of each of which are incorporated herein by reference in their entirety.

[0724] In one embodiment, the linker may be a spacer region of one or more nucleotides. Non-limiting examples of spacers are TCTAGATAATACGACTCACTAGAGATCC (SEQ ID NO: 2819), TATGGCCACAACCATG (SEQ ID NO: 2820), AATCTAGATAATACGACTCACTAGAGATCC (SEQ ID NO: 2821), GCTTGCCACAACCCACAAGGAGACGACCTTCC (SEQ ID NO: 2760), TCGCGAATG, or TCGCGA.

[0725] In one embodiment, the linker may be a BamHI site. As a non-limiting example, the BamHI site has the amino acid sequence GS and/or the DNA sequence GGATCC.

[0726] Other linkers will be apparent to those skilled in the art and may be used in connection with alternate embodiments of the invention.

[0727] The linkers of the present invention may also be non-peptide linkers. For example, alkyl linkers such as —NH (CH₂)a-C(O), wherein a=2-20 can be used. These alkyl linkers may further be substituted by any non-sterically hindering group such as lower alkyl (e.g., C₁-C₆) lower acyl, halogen (e.g., Cl, Br), CN, NH₂, phenyl, etc.

[0728] In some aspects, the linker may be an artificial linker from U.S. Pat. Nos. 4,946,778, 5,525,491, 5,856,456; and International Patent Publication NO. WO2012/083424; the contents of each of which are incorporated herein by reference in their entirety.

[0729] In some embodiments, linkers of the present invention, include without limitation, any of those taught in Table 11 of copending commonly owned U.S. Provisional Patent Application No. 62/320,864 filed on Apr. 11, 2016 or in U.S. Provisional Application No. 62/466,596 filed Mar. 3, 2017 and the International Publication WO2017/180587, the contents of each of which are incorporated herein by reference in their entirety.

[0730] In some embodiments, compositions of the invention may include optional proteasome adaptors. As used herein, the term “proteasome adaptor” refers to any nucleotide/amino acid sequence that targets the appended payload for degradation. In some aspects, the adaptors target the payload for degradation directly thereby circumventing the need for ubiquitination reactions. Proteasome adaptors may be used in conjunction with destabilizing domains to reduce the basal expression of the payload. Exemplary proteasome adaptors include the UbL domain of Rad23 or hHR23b, HPV E7 which binds to both the target protein Rb and the S4 subunit of the proteasome with high affinity, which allows direct proteasome targeting, bypassing the ubiquitination machinery; the protein gankyrin which binds to Rb and the proteasome subunit S6.

### 6. Embedded Stimulus, Signals and Other Regulatory Features

[0731] In some embodiments, the effector module of the present invention may further comprise one or more microRNAs, microRNA binding sites, promotors and tunable elements. In one embodiment, microRNA may be used in support of the creation of tunable biocircuits. Each aspect or tuned modality may bring to the effector module or biocircuit a differentially tuned feature. For example, a destabilizing domain may alter cleavage sites or dimerization properties or half-life of the payload, and the inclusion of one or more microRNA or microRNA binding site may impart cellular detargeting or trafficking features. Consequently, the present invention embraces biocircuits which are multifactorial in their tenability. Such biocircuits and effector modules may be engineered to contain one, two, three, four or more tuned features. In some embodiments, micro RNA sequences of the present invention, include without limitation, any of those taught in Table 13 of copending commonly owned U.S. Provisional Patent Application No. 62/320,864, filed on Apr. 11, 2016, or in U.S. Provisional Application No. 62/466,596 filed Mar. 3, 2017 and the International Publication WO2017/180587, the contents of which are incorporated herein by reference in their entirety.

[0732] microRNAs (or miRNA) are 19-25 nucleotide long noncoding RNAs that bind to the 3′UTR of nucleic acid molecules and down-regulate gene expression either by reducing nucleic acid molecule stability or by inhibiting translation. The polynucleotides of the invention may comprise one or more microRNA target sequences, microRNA sequences, or microRNA seeds. Such sequences may correspond to any known microRNA such as those taught in US Publication Nos. US2005/0261218 and US2005/0059005, the contents of each of which are incorporated herein by reference in their entirety. As a non-limiting embodiment, known microRNAs, their sequences and their binding site sequences in the human genome are in Table 14 of the copending commonly owned U.S. Ser. No. 62/320,864 filed on Apr. 11, 2016 or in U.S. Provisional Application No. 62/466,596 filed Mar. 3, 2017 and the International Publication WO2017/180587, the contents of each of which are incorporated herein by reference in their entirety.

[0733] A microRNA sequence comprises a “seed” region, i.e., a sequence in the region of positions 2-8 of the mature microRNA, which sequence has perfect Watson-Crick complementarity to the miRNA target sequence. A microRNA seed may comprise positions 2-8 or 2-7 of the mature microRNA. In some embodiments, a microRNA seed may comprise 7 nucleotides (e.g., nucleotides 2-8 of the mature microRNA), wherein the seed-complementary site in the corresponding miRNA target is flanked by an adenine (A) opposed to microRNA position 1. In some embodiments, a microRNA seed may comprise 6 nucleotides (e.g., nucleotides 2-7 of the mature microRNA), wherein the seed-complementary site in the corresponding miRNA target is flanked by an adenine (A) opposed to microRNA position 1. See for example, Grimson A, Farh K K, Johnston W K, Garrett-Engele P, Lim L P, Bartel D P; Mol Cell. 2007 Jul. 6; 27(1):91-105. The bases of the microRNA seed have complete complementarity with the target sequence. By engineering microRNA target sequences into the polynucleotides encoding the biocircuit components, effector modules, SREs or payloads of the invention one can target the molecule for degradation or reduced translation, provided the microRNA in question is available. This process will reduce the hazard of off target effects upon nucleic acid molecule delivery.

[0734] Identification of microRNA, microRNA target regions, and their expression patterns and role in biology have been reported (Bonauer et al., Curr Drug Targets 2010 11:943-949; Anand and Cheresh Curr Opin Hematol 2011 18:171-176; Contreras and Rao Leukemia 2012 26:404-413 (2011 Dec. 20. doi: 10.1038/leu.2011.356); Bartel Cell 2009 136:215-233; Landgraf et al, Cell, 2007 129:1401-1414; Gentner and Naldini, Tissue Antigens. 2012 80:393-403 and all references therein; each of which is herein incorporated by reference in its entirety).

[0735] For example, if the polynucleotide is not intended to be delivered to the liver but ends up there, then miR-122, a microRNA abundant in liver, can inhibit the expression of the polynucleotide if one or multiple target sites of miR-122 are engineered into the polynucleotide. Introduction of one or multiple binding sites for different microRNA can be engineered to further decrease the longevity, stability, and protein translation of a polynucleotide hence providing an additional layer of tenability beyond the stimulus selection, SRE design and payload variation.

[0736] As used herein, the term “microRNA site” refers to a microRNA target site or a microRNA recognition site, or any nucleotide sequence to which a microRNA binds or associates. It should be understood that “binding” may follow traditional Watson-Crick hybridization rules or may reflect any stable association of the microRNA with the target sequence at or adjacent to the microRNA site.

[0737] Conversely, for the purposes of the polynucleotides of the present invention, microRNA binding sites can be engineered out of (i.e. removed from) sequences in which they naturally occur in order to increase protein expression in specific tissues. For example, miR-122 binding sites may be removed to improve protein expression in the liver.

[0738] Regulation of expression in multiple tissues can be accomplished through introduction or removal or one or several microRNA binding sites.

[0739] Specifically, microRNAs are known to be differentially expressed in immune cells (also called hematopoietic cells), such as antigen presenting cells (APCs) (e.g. dendritic cells and macrophages), macrophages, monocytes, B lymphocytes, T lymphocytes, granulocytes, natural killer cells, etc. Immune cell specific microRNAs are involved in immunogenicity, autoimmunity, the immune-response to infection, inflammation, as well as unwanted immune response after gene therapy and tissue/organ transplantation. Immune cells specific microRNAs also regulate many aspects of development, proliferation, differentiation and apoptosis of hematopoietic cells (immune cells). For example, miR-142 and miR-146 are exclusively expressed in the immune cells, particularly abundant in myeloid dendritic cells. Introducing the miR-142 binding site into the 3′-UTR of a polypeptide of the present invention can selectively suppress the gene expression in the antigen presenting cells through miR-142 mediated mRNA degradation, limiting antigen presentation in professional APCs (e.g. dendritic cells) and thereby preventing antigen-mediated immune response after gene delivery (see, Annoni A et al., blood, 2009, 114, 5152-5161, the content of which is herein incorporated by reference in its entirety.)

[0740] In one embodiment, microRNAs binding sites that are known to be expressed in immune cells, in particular, the antigen presenting cells, can be engineered into the polynucleotides to suppress the expression of the polynucleotide in APCs through microRNA mediated RNA degradation, subduing the antigen-mediated immune response, while the expression of the polynucleotide is maintained in non-immune cells where the immune cell specific microRNAs are not expressed.

[0741] Many microRNA expression studies have been conducted, and are described in the art, to profile the differential expression of microRNAs in various cancer cells/tissues and other diseases. Some microRNAs are abnormally over-expressed in certain cancer cells and others are under-expressed. For example, microRNAs are differentially expressed in cancer cells (WO2008/154098, US2013/0059015, US2013/0042333, WO2011/157294); cancer stem cells (US2012/0053224); pancreatic cancers and diseases (US2009/0131348, US2011/0171646, US2010/0286232, U.S. Pat. No. 8,389,210); asthma and inflammation (U.S. Pat. No. 8,415,096); prostate cancer (US2013/0053264); hepatocellular carcinoma (WO2012/151212, US2012/0329672, WO2008/054828, U.S. Pat. No. 8,252,538); lung cancer cells (WO2011/076143, WO2013/033640, WO2009/070653, US2010/0323357); cutaneous T cell lymphoma (WO2013/011378); colorectal cancer cells (WO2011/0281756, WO2011/076142); cancer positive lymph nodes (WO2009/100430, US2009/0263803); nasopharyngeal carcinoma (EP2112235); chronic obstructive pulmonary disease (US2012/0264626, US2013/0053263); thyroid cancer (WO2013/066678); ovarian cancer cells (US2012/0309645, WO2011/095623); breast cancer cells (WO2008/154098, WO2007/081740, US2012/0214699), leukemia and lymphoma (WO2008/073915, US2009/0092974, US2012/0316081, US2012/0283310, WO2010/018563, the content of each of which is incorporated herein by reference in their entirety).

[0742] In some embodiments, micro RNA sequences of the present invention, include without limitation, any of those taught in Table 13 of copending commonly owned U.S. Provisional Patent Application No. 62/320,864 filed on Apr. 11, 2016, or in U.S. Provisional Application No. 62/466,596 filed Mar. 3, 2017 and the International Publication WO2017/180587, the contents of each of which are incorporated herein by reference in their entirety.

[0743] In some embodiments, compositions of the invention may include optional proteasome adaptors. As used herein, the term “proteasome adaptor” refers to any nucleotide/amino acid sequence that targets the appended payload for degradation. In some aspects, the adaptors target the payload for degradation directly thereby circumventing the need for ubiquitination reactions. Proteasome adaptors may be used in conjunction with destabilizing domains to reduce the basal expression of the payload. Exemplary proteasome adaptors include the UbL domain of Rad23 or hHR23b, HPV E7 which binds to both the target protein Rb and the S4 subunit of the proteasome with high affinity, which allows direct proteasome targeting, bypassing the ubiquitination machinery; the protein gankyrin which binds to Rb and the proteasome subunit S6.

[0744] In one embodiment, microRNA may be used as described herein in support of the creation of tunable biocircuits.

[0745] In some embodiments, effector modules may be designed to encode (as a DNA or RNA or mRNA) one or more payloads, SREs and/or regulatory sequence such as a microRNA or microRNA binding site. In some embodiments, any of the encoded payloads or SREs may be stabilized or de-stabilized by mutation and then combined with one or more regulatory sequences to generate a dual or multi-tuned effector module or biocircuit system.

[0746] Each aspect or tuned modality may bring to the effector module or biocircuit a differentially tuned feature. For example, an SRE may represent a destabilizing domain, while mutations in the protein payload may alter its cleavage sites or dimerization properties or half-life and the inclusion of one or more microRNA or microRNA binding site may impart cellular detargeting or trafficking features. Consequently, the present invention embraces biocircuits which are multifactorial in their tenability.

[0747] In some embodiments, compositions of the invention may include optional proteasome adaptors. As used herein, the term “proteasome adaptor” refers to any nucleotide/amino acid sequence that targets the appended payload for degradation. In some aspects, the adaptors target the payload for degradation directly thereby circumventing the need for ubiquitination reactions. Proteasome adaptors may be used in conjunction with destabilizing domains to reduce the basal expression of the payload. Exemplary proteasome adaptors include the UbL domain of Rad23 or hHR23b, HPV E7 which binds to both the target protein Rb and the S4 subunit of the proteasome with high affinity, which allows direct proteasome targeting, bypassing the ubiquitination machinery; the protein gankyrin which binds to Rb and the proteasome subunit S6.

[0748] Such biocircuits may be engineered to contain one, two, three, four or more tuned features.

[0749] In some embodiments, microRNA sequences of the present invention, include without limitation, any of those taught in Table 13 of copending commonly owned U.S. Provisional Patent Application No. 62/320,864 filed on Apr. 11, 2016 or in U.S. Provisional Application No. 62/466,596 filed Mar. 3, 2017 and the International Publication WO2017/180587, the contents of each of which are incorporated herein by reference in their entirety.

### Polynucleotides

[0750] The present invention provides polynucleotides encoding novel hDHFR DDs, effector modules comprising payloads and associated DDs, biocircuit systems comprising DDs and effector modules, and other components of the present invention.

[0751] The term “polynucleotide” or “nucleic acid molecule” in its broadest sense, includes any compound and/or substance that comprise a polymer of nucleotides, e.g., linked nucleosides. These polymers are often referred to as polynucleotides. Exemplary nucleic acids or polynucleotides of the invention include, but are not limited to, ribonucleic acids (RNAs), deoxyribonucleic acids (DNAs), threose nucleic acids (TNAs), glycol nucleic acids (GNAs), peptide nucleic acids (PNAs), locked nucleic acids (LNAs, including LNA having a β-D-ribo configuration, α-LNA having an α-L-ribo configuration (a diastereomer of LNA), 2′-amino-LNA having a 2′-amino functionalization, and 2′-amino-α-LNA having a 2′-amino functionalization) or hybrids thereof.

[0752] In some embodiments, polynucleotides of the invention may be a messenger RNA (mRNA) or any nucleic acid molecule and may or may not be chemically modified. In one aspect, the nucleic acid molecule is a mRNA. As used herein, the term “messenger RNA (mRNA)” refers to any polynucleotide which encodes a polypeptide of interest and which is capable of being translated to produce the encoded polypeptide of interest in vitro, in vivo, in situ or ex vivo.

[0753] Traditionally, the basic components of an mRNA molecule include at least a coding region, a 5′UTR, a 3′UTR, a 5′ cap and a poly-A tail. Building on this wild type modular structure, the present invention expands the scope of functionality of traditional mRNA molecules by providing payload constructs which maintain a modular organization, but which comprise one or more structural and/or chemical modifications or alterations which impart useful properties to the polynucleotide, for example tenability of function. As used herein, a “structural” feature or modification is one in which two or more linked nucleosides are inserted, deleted, duplicated, inverted or randomized in a polynucleotide without significant chemical modification to the nucleosides themselves. Because chemical bonds will necessarily be broken and reformed to effect a structural modification, structural modifications are of a chemical nature and hence are chemical modifications. However, structural modifications will result in a different sequence of nucleotides. For example, the polynucleotide “ATCG” may be chemically modified to “AT-5meC-G”. The same polynucleotide may be structurally modified from “ATCG” to “ATCCCG”. Here, the dinucleotide “CC” has been inserted, resulting in a structural modification to the polynucleotide.

[0754] In some embodiments, polynucleotides of the present invention may harbor 5′UTR sequences which play a role in translation initiation. 5′UTR sequences may include features such as Kozak sequences which are commonly known to be involved in the process by which the ribosome initiates translation of genes, Kozak sequences have the consensus XCCR(A/G)CC-start codon (AUG), where R is a purine (adenine or guanine) three bases upstream of the start codon (AUG) and X is any nucleotide. In one embodiment, the Kozak sequence is ACCGCC. By engineering the features that are typically found in abundantly expressed genes of target cells or tissues, the stability and protein production of the polynucleotides of the invention can be enhanced.

[0755] In some embodiments, polynucleotides of the present invention may harbor 5′UTR sequences which play a role in translation initiation. 5′UTR sequences may include features such as Kozak sequences which are commonly known to be involved in the process by which the ribosome initiates translation of genes, Kozak sequences have the consensus XCCR(A/G) CCAUG, where R is a purine (adenine or guanine) three bases upstream of the start codon (AUG) and X is any nucleotide. In one embodiment, the Kozak sequence is ACCGCC.

[0756] In some embodiments, polynucleotides of the present invention may harbor 5′UTR sequences which play a role in translation initiation. 5′UTR sequences may include features such as Kozak sequences which are commonly known to be involved in the process by which the ribosome initiates translation of genes, Kozak sequences have the consensus XCCR(A/G) CCAUG, where R is a purine (adenine or guanine) three bases upstream of the start codon (AUG) and X is any nucleotide. In one embodiment, the Kozak sequence is ACCGCC. By engineering the features that are typically found in abundantly expressed genes of target cells or tissues, the stability and protein production of the polynucleotides of the invention can be enhanced.

[0757] Further provided are polynucleotides, which may contain an internal ribosome entry site (IRES) which play an important role in initiating protein synthesis in the absence of 5′ cap structure in the polynucleotide. An IRES may act as the sole ribosome binding site, or may serve as one of the multiple binding sites. Polynucleotides of the invention containing more than one functional ribosome binding site may encode several peptides or polypeptides that are translated independently by the ribosomes giving rise to bicistronic and/or multicistronic nucleic acid molecules.

[0758] In some embodiments, polynucleotides encoding biocircuits, effector modules, SREs and payloads of interest such as immunotherapeutic agents may include from about 30 to about 100,000 nucleotides (e.g., from 30 to 50, from 30 to 100, from 30 to 250, from 30 to 500, from 30 to 1,000, from 30 to 1,500, from 30 to 3,000, from 30 to 5,000, from 30 to 7,000, from 30 to 10,000, from 30 to 25,000, from 30 to 50,000, from 30 to 70,000, from 100 to 250, from 100 to 500, from 100 to 1,000, from 100 to 1,500, from 100 to 3,000, from 100 to 5,000, from 100 to 7,000, from 100 to 10,000, from 100 to 25,000, from 100 to 50,000, from 100 to 70,000, from 100 to 100,000, from 500 to 1,000, from 500 to 1,500, from 500 to 2,000, from 500 to 3,000, from 500 to 5,000, from 500 to 7,000, from 500 to 10,000, from 500 to 25,000, from 500 to 50,000, from 500 to 70,000, from 500 to 100,000, from 1,000 to 1,500, from 1,000 to 2,000, from 1,000 to 3,000, from 1,000 to 5,000, from 1,000 to 7,000, from 1,000 to 10,000, from 1,000 to 25,000, from 1,000 to 50,000, from 1,000 to 70,000, from 1,000 to 100,000, from 1,500 to 3,000, from 1,500 to 5,000, from 1,500 to 7,000, from 1,500 to 10,000, from 1,500 to 25,000, from 1,500 to 50,000, from 1,500 to 70,000, from 1,500 to 100,000, from 2,000 to 3,000, from 2,000 to 5,000, from 2,000 to 7,000, from 2,000 to 10,000, from 2,000 to 25,000, from 2,000 to 50,000, from 2,000 to 70,000, and from 2,000 to 100,000 nucleotides). In some aspects, polynucleotides of the invention may include more than 10,000 nucleotides.

[0759] Regions of the polynucleotides which encode certain features such as cleavage sites, linkers, trafficking signals, tags or other features may range independently from 10-1,000 nucleotides in length (e.g., greater than 20, 30, 40, 45, 50, 55, 60, 70, 80, 90, 100, 120, 140, 160, 180, 200, 250, 300, 350, 400, 450, 500, 600, 700, 800, and 900 nucleotides or at least 10, 15, 20, 25, 30, 35, 40, 45, 50, 55, 60, 70, 80, 90, 100, 120, 140, 160, 180, 200, 250, 300, 350, 400, 450, 500, 600, 700, 800, 900, and 1,000 nucleotides).

[0760] In some embodiments, polynucleotides of the present invention may further comprise embedded regulatory moieties such as microRNA binding sites within the 3′UTR of nucleic acid molecules which when bind to microRNA molecules, down-regulate gene expression either by reducing nucleic acid molecule stability or by inhibiting translation. Conversely, for the purposes of the polynucleotides of the present invention, microRNA binding sites can be engineered out of (i.e. removed from) sequences in which they naturally occur in order to increase protein expression in specific tissues. For example, miR-142 and miR-146 binding sites may be removed to improve protein expression in the immune cells. In some embodiments, any of the encoded payloads may be may be regulated by an SRE and then combined with one or more regulatory sequences to generate a dual or multi-tuned effector module or biocircuit system.

[0761] In some embodiments, polynucleotides of the present invention may encode fragments, variants, derivatives of polypeptides of the inventions. In some aspects, the variant sequence may keep the same or a similar activity. Alternatively, the variant may have an altered activity (e.g., increased or decreased) relative to the start sequence. Generally, variants of a particular polynucleotide or polypeptide of the invention will have at least about 40%, 45%, 50%, 55%, 60%, 65%, 70%, 75%, 80%, 85%, 90%, 91%, 92%, 93%, 94%, 95%, 96%, 97%, 98%, 99% but less than 100% sequence identity to that particular reference polynucleotide or polypeptide as determined by sequence alignment programs and parameters described herein and known to those skilled in the art. Such tools for alignment include those of the BLAST suite (Stephen et al., Gapped BLAST and PSI-BLAST: a new generation of protein database search programs, Nucleic Acids Res., 1997, 25:3389-3402.)

[0762] In some embodiments, polynucleotides of the present invention may be modified. As used herein, the terms “modified”, or as appropriate, “modification” refers to chemical modification with respect to A, G, U (T in DNA) or C nucleotides. Modifications may be on the nucleoside base and/or sugar portion of the nucleosides which comprise the polynucleotide. In some embodiments, multiple modifications are included in the modified nucleic acid or in one or more individual nucleoside or nucleotide. For example, modifications to a nucleoside may include one or more modifications to the nucleobase and the sugar. Modifications to the polynucleotides of the present invention may include any of those taught in, for example, International Publication NO. WO2013/052523, the contents of which are incorporated herein by reference in its entirety.

[0763] As described herein “nucleoside” is defined as a compound containing a sugar molecule (e.g., a pentose or ribose) or a derivative thereof in combination with an organic base (e.g., a purine or pyrimidine) or a derivative thereof (also referred to herein as “nucleobase”). As described herein, “nucleotide” is defined as a nucleoside including a phosphate group.

[0764] In some embodiments, the modification may be on the internucleoside linkage (e.g., phosphate backbone). Herein, in the context of the polynucleotide backbone, the phrases “phosphate” and “phosphodiester” are used interchangeably. Backbone phosphate groups can be modified by replacing one or more of the oxygen atoms with a different substituent. Further, the modified nucleosides and nucleotides can include the wholesale replacement of an unmodified phosphate moiety with another internucleoside linkage. Examples of modified phosphate groups include, but are not limited to, phosphorothioate, phosphoroselenates, boranophosphates, boranophosphate esters, hydrogen phosphonates, phosphoramidates, phosphorodiamidates, alkyl or aryl phosphonates, and phosphotriesters. Phosphorodithioates have both non-linking oxygens replaced by sulfur. The phosphate linker can also be modified by the replacement of a linking oxygen with nitrogen (bridged phosphoramidates), sulfur (bridged phosphorothioates), and carbon (bridged methylene-phosphonates). Other modifications which may be used are taught in, for example, International Application NO. WO2013/052523, the contents of which are incorporated herein by reference in their entirety.

[0765] Chemical modifications and/or substitution of the nucleotides or nucleobases of the polynucleotides of the invention which are useful in the present invention include any modified substitutes known in the art, for example, (±)1-(2-Hydroxypropyl)pseudouridine TP, (2R)-1-(2-Hydroxypropyl)pseudouridine TP, 1-(4-Methoxy-phenyl)pseudo-UTP,2′-O-dimethyladenosine, 1,2′-O-dimethylguanosine, 1,2′-O-dimethylinosine, 1-Hexyl-pseudo-UTP, 1-Homoallylpseudouridine TP, 1-Hydroxymethylpseudouridine TP, 1-iso-propyl-pseudo-UTP, 1-Me-2-thio-pseudo-UTP, 1-Me-4-thio-pseudo-UTP, 1-Me-alpha-thio-pseudo-UTP, 1-Me-GTP, 2′-Amino-2′-deoxy-ATP, 2′-Amino-2′-deoxy-CTP, 2′-Amino-2′-deoxy-GTP, 2′-Amino-2′-deoxy-UTP, 2′-Azido-2′-deoxy-ATP, tubercidine, undermodified hydroxywybutosine, uridine 5-oxyacetic acid, uridine 5-oxyacetic acid methyl ester, wybutosine, wyosine, xanthine, Xanthosine-5′-TP, xylo-adenosine, zebularine, α-thio-adenosine, α-thio-cytidine, α-thio-guanosine, and/or α-thio-uridine.

[0766] Polynucleotides of the present invention may comprise one or more of the modifications taught herein. Different sugar modifications, base modifications, nucleotide modifications, and/or internucleoside linkages (e.g., backbone structures) may exist at various positions in the polynucleotide of the invention. One of ordinary skill in the art will appreciate that the nucleotide analogs or other modification(s) may be located at any position(s) of a polynucleotide such that the function of the polynucleotide is not substantially decreased. A modification may also be a 5′ or 3′ terminal modification. The polynucleotide may contain from about 1% to about 100% modified nucleotides (either in relation to overall nucleotide content, or in relation to one or more types of nucleotide, i.e. any one or more of A, G, U or C) or any intervening percentage (e.g., from 1% to 20%, from 1% to 25%, from 1% to 50%, from 1% to 60%, from 1% to 70%, from 1% to 80%, from 1% to 90%, from 1% to 95%, from 10% to 20%, from 10% to 25%, from 10% to 50%, from 10% to 60%, from 10% to 70%, from 10% to 80%, from 10% to 90%, from 10% to 95%, from 10% to 100%, from 20% to 25%, from 20% to 50%, from 20% to 60%, from 20% to 70%, from 20% to 80%, from 20% to 90%, from 20% to 95%, from 20% to 100%, from 50% to 60%, from 50% to 70%, from 50% to 80%, from 50% to 90%, from 50% to 95%, from 50% to 100%, from 70% to 80%, from 70% to 90%, from 70% to 95%, from 70% to 100%, from 80% to 90%, from 80% to 95%, from 80% to 100%, from 90% to 95%, from 90% to 100%, and from 95% to 100%).

[0767] In some embodiments, one or more codons of the polynucleotides of the present invention may be replaced with other codons encoding the native amino acid sequence to tune the expression of the SREs, through a process referred to as codon selection. Since mRNA codon, and tRNA anticodon pools tend to vary spatiotemporally i.e. among organisms, cell types, sub cellular locations and over time, the codon selection described herein is a spatiotemporal (ST) codon selection.

[0768] In some embodiments of the invention, certain polynucleotide features may be codon optimized. Codon optimization refers to a process of modifying a nucleic acid sequence for enhanced expression in the host cell by replacing at least 1, 2, 3, 4, 5, 10, 15, 20, 25, 50 or more codons of the native sequence with codons that are most frequently used in the genes of that host cell while maintaining the native amino acid sequence. Codon usage may be measured using the Codon Adaptation Index (CAI) which measures the deviation of a coding polynucleotide sequence from a reference gene set. Codon usage tables are available at the Codon Usage Database (http://www.kazusa.or.jp/codon/) and the CAI can be calculated by EMBOSS CAI program (http://emboss.sourceforge.net/). Codon optimization methods are known in the art and may be useful in efforts to achieve one or more of several goals. These goals include to match codon frequencies in target and host organisms to ensure proper folding, bias nucleotide content to alter stability or reduce secondary structures, minimize tandem repeat codons or base runs that may impair gene construction or expression, customize transcriptional and translational control regions, insert or remove protein signaling sequences, remove/add post translation modification sites in encoded protein (e.g. glycosylation sites), add, remove or shuffle protein domains, insert or delete restriction sites, modify ribosome binding sites and degradation sites, to adjust translational rates to allow the various domains of the protein to fold properly, or to reduce or eliminate problem secondary structures within the polynucleotide. Codon optimization tools, algorithms and services are known in the art, and non-limiting examples include services from GeneArt (Life Technologies), DNA2.0 (Menlo Park CA), OptimumGene (GenScript, Piscataway, NJ), algorithms such as but not limited to, DNAWorks v3.2.3, Mr. Gene (GmBH, Regensburg, Germany) and/or proprietary methods. In one embodiment, a polynucleotide sequence or portion thereof is codon optimized using optimization algorithms. Codon options for each amino acid are well-known in the art as are various species table for optimizing for expression in that particular species.

[0769] In some embodiments of the invention, certain polynucleotide features may be codon optimized. For example, a preferred region for codon optimization may be upstream (5′) or downstream (3′) to a region which encodes a polypeptide. These regions may be incorporated into the polynucleotide before and/or after codon optimization of the payload encoding region or open reading frame (ORF).

[0770] After optimization (if desired), the polynucleotide components are reconstituted and transformed into a vector such as, but not limited to, plasmids, viruses, cosmids, and artificial chromosomes.

[0771] Spatiotemporal codon selection may impact the expression of the polynucleotides of the invention, since codon composition determines the rate of translation of the mRNA species and its stability. For example, tRNA anticodons to optimized codons are abundant, and thus translation may be enhanced. In contrast, tRNA anticodons to less common codons are fewer and thus translation may proceed at a slower rate. Presnyak et al. have shown that the stability of an mRNA species is dependent on the codon content, and higher stability and thus higher protein expression may be achieved by utilizing optimized codons (Presnyak et al. (2015) Cell 160, 1111-1124; the contents of which are incorporated herein by reference in their entirety). Thus, in some embodiments, ST codon selection may include the selection of optimized codons to enhance the expression of the SRES, effector modules and biocircuits of the invention. In other embodiments, spatiotemporal codon selection may involve the selection of codons that are less commonly used in the genes of the host cell to decrease the expression of the compositions of the invention. The ratio of optimized codons to codons less commonly used in the genes of the host cell may also be varied to tune expression.

[0772] In some embodiments, certain regions of the polynucleotide may be preferred for codon selection. For example, a preferred region for codon selection may be upstream (5′) or downstream (3′) to a region which encodes a polypeptide. These regions may be incorporated into the polynucleotide before and/or after codon selection of the payload encoding region or open reading frame (ORF).

[0773] The stop codon of the polynucleotides of the present invention may be modified to include sequences and motifs to alter the expression levels of the SREs, payloads and effector modules of the present invention. Such sequences may be incorporated to induce stop codon readthrough, wherein the stop codon may specify amino acids e.g. selenocysteine or pyrrolysine. In other instances, stop codons may be skipped altogether to resume translation through an alternate open reading frame. Stop codon read through may be utilized to tune the expression of components of the effector modules at a specific ratio (e.g. as dictated by the stop codon context). Examples of preferred stop codon motifs include UGAN, UAAN, and UAGN, where N is either C or U.

[0774] Polynucleotide modifications and manipulations can be accomplished by methods known in the art such as, but not limited to, site directed mutagenesis and recombinant technology. The resulting modified molecules may then be tested for activity using in vitro or in vivo assays such as those described herein or any other suitable screening assay known in the art.

[0775] In some embodiments, polynucleotides of the invention may comprise two or more effector module sequences, or two or more payload of interest sequences, which are in a pattern such as ABABAB or AABBAABBAABB or ABCABCABC or variants thereof repeated once, twice, or more than three times. In these patterns, each letter, A, B, or C represent a different effector module component.

[0776] In yet another embodiment, polynucleotides of the invention may comprise two or more effector module component sequences with each component having one or more SRE sequences (DD sequences), or two or more payload sequences. As a non-limiting example, the sequences may be in a pattern such as ABABAB or AABBAABBAABB or ABCABCABC or variants thereof repeated once, twice, or more than three times in each of the regions. As another non-limiting example, the sequences may be in a pattern such as ABABAB or AABBAABBAABB or ABCABCABC or variants thereof repeated once, twice, or more than three times across the entire polynucleotide. In these patterns, each letter, A, B, or C represent a different sequence or component.

[0777] According to the present invention, polynucleotides encoding distinct biocircuits, effector modules, SREs and payload constructs may be linked together through the 3′-end using nucleotides which are modified at the 3′-terminus. Chemical conjugation may be used to control the stoichiometry of delivery into cells. Polynucleotides can be designed to be conjugated to other polynucleotides, dyes, intercalating agents (e.g. acridines), cross-linkers (e.g. psoralene, mitomycin C), porphyrins (TPPC4, texaphyrin, Sapphyrin), polycyclic aromatic hydrocarbons (e.g., phenazine, dihydrophenazine), artificial endonucleases (e.g. EDTA), alkylating agents, phosphate, amino, mercapto, PEG (e.g., PEG-40K), MPEG, [MPEG]2, polyamino, alkyl, substituted alkyl, radiolabeled markers, enzymes, haptens (e.g. biotin), transport/absorption facilitators (e.g., aspirin, vitamin E, folic acid), synthetic ribonucleases, proteins, e.g., glycoproteins, or peptides, e.g., molecules having a specific affinity for a co-ligand, or antibodies e.g., an antibody, that binds to a specified cell type such as a cancer cell, endothelial cell, or bone cell, hormones and hormone receptors, non-peptidic species, such as lipids, lectins, carbohydrates, vitamins, cofactors, or a drug. As non-limiting examples, they may be conjugates with other immune conjugates.

[0778] In some embodiments, the compositions of the polynucleotides of the invention may be generated by combining the various components of the effector modules using the Gibson assembly method. The Gibson assembly reaction consists of three isothermal reactions, each relying on a different enzymatic activity including a 5′ exonuclease which generates long overhangs, a polymerase which fills in the gaps of the annealed single strand regions and a DNA ligase which seals the nicks of the annealed and filled-in gaps. Polymerase chain reactions performed prior to Gibson assembly which may be used to generate PCR products with overlapping sequence. These methods can be repeated sequentially, to assemble larger and larger molecules. For example, the method can comprise repeating a method as above to join a second set of two or more DNA molecules of interest to one another, and then repeating the method again to join the first and second set DNA molecules of interest, and so on. At any stage during these multiple rounds of assembly, the assembled DNA can be amplified by transforming it into a suitable microorganism, or it can be amplified in vitro (e.g., with PCR).

[0779] In some embodiments, polynucleotides of the invention may encode a fusion polypeptide comprising a destabilizing domain (DD) and at least one immunotherapeutic agent taught herein. The DD domain may be a hDHFR mutant derived by site directed mutagenesis and may be selected from the single mutation hDHFR (Y122I) (e.g., the nucleic acid sequence of SEQ ID NO. 5941 (starting from amino acid 2-187 of the wild type hDHFR sequence) or the codon optimized nucleic acid sequence of SEQ ID NO. 5942), double mutations hDHFR (M53T, R138I) (e.g., the nucleic acid sequence of SEQ ID NO. 5943), hDHFR (V75F, Y122I) (e.g., the nucleic acid sequence of SEQ ID NO. 5944), hDHFR (A125F, Y122I) (e.g., the nucleic acid sequence of SEQ ID NO. 5945 (starting from amino acid 2-187 of the wild type hDHFR sequence) or the codon optimized nucleic acid sequence of SEQ ID NO. 5946), hDHFR (L74N, Y122I) (e.g., the nucleic acid sequence of SEQ ID NO. 5947), hDHFR (L94A, T147A) (e.g., the nucleic acid sequence of SEQ ID NO. 5948), hDHFR (G21T, Y122I) (e.g., the nucleic acid sequence of SEQ ID NO. 5949), hDHFR (V121A, Y122I) (e.g., the nucleic acid sequence of SEQ ID NO. 5950, and hDHFR (Q36K, Y122I) comprising the nucleic acid sequence of SEQ ID NO. 5951 (starting from amino acid 2-187 of the wild type hDHFR sequence) or the codon optimized nucleic acid sequence of SEQ NO. 5952), and triple mutations hDHFR (Q36F, N65F, Y122I) (e.g., the nucleic acid sequence of SEQ ID NO. 5953 (starting from amino acid 2-187 of the wild type hDHFR sequence) or the codon optimized nucleic acid sequence of SEQ ID NO. 5954), hDHFR (Q36F, Y122I, A125F) (e.g., the nucleic acid sequence of SEQ ID NO. 5955 (starting from amino acid 2-187 of the wild type hDHFR sequence)). In other embodiments, the DHFR mutant may be derived by random mutagenesis and may include hDHFR mutant comprising the nucleic acid sequence of SEQ ID NO. 90-117, 119-125 and 2738.

[0780] In some embodiments, the polynucleotides of the invention may encode effector modules comprising the hDHFR DD-CD19CAR fusion polypeptide comprising the nucleotide sequence of SEQ ID NO. 5956-5959, 5960, 5961, or 5962, 5963 or hDHFR DD-IL15/IL15Ra fusion polypeptide comprising the nucleotide sequence of SEQ ID NO. 5964-5966, or hDHFR DD-IL12 fusion polypeptide comprising the nucleotide sequence of SEQ ID NO. 5967-5968; or a hDHFR DD-Caspase 9 fusion polypeptide comprising the nucleotide sequence of SEQ ID NO. 5969-5971.

[0781] In some embodiments, polynucleotides of the present invention may encode a fusion polypeptide comprising a destabilizing domain (DD) and at least one immunotherapeutic agent taught herein. The DD domain may be a FKBP mutant encoded by nucleotide sequence of SEQ ID NO: 5972-5983, and/or 5984, an ecDHFR mutant encoded by nucleotide sequence of SEQ ID NO: 5985-5992, and/or 5993, hDHFR mutant encoded by nucleotide sequence of SEQ ID NO: 5994-6008 and/or 6048-6050, 6096, 6047, 6045, 6046, 6052, 6053, 6009-6044, 6055, and/or 6056-6059.

[0782] In some embodiments, the polynucleotides of the invention may encode effector modules comprising the CD19 CAR as the payload comprising the nucleotide sequence of SEQ ID NO: 6060-6074 and/or 1662-1646, 3080, 1713-1717, 1719-1723, 2761, or IL12 as the payload comprising the nucleotide sequence of SEQ ID NO. 6075-6083, or IL15 as the payload comprising the nucleotide sequence of SEQ ID NO: 6084-6084, and/or 6087, 6088, or IL15/IL15Ra fusion polypeptide as the payload comprising the nucleotide sequence of SEQ ID NO: 6089-6115, 6116, and/or 6117.

[0783] In some embodiments, polynucleotides of the present invention may encode a fusion polypeptide comprising a destabilizing domain (DD) and at least one immunotherapeutic agent taught herein. The DD domain may be a FKBP mutant encoded by nucleotide sequence of SEQ. ID NO. 6118-6120, and/or 6121-6124, an ecDHFR mutant encoded by nucleotide sequence of SEQ. ID NO. 6125-6128 and/or 6129, hDHFR mutant encoded by nucleotide sequence of SEQ. ID NO. 6130-6144, 6151-6155, and/or 5551, 5552, 5554, 5555, 5556, 5557, 5558, 6151.

[0784] In some embodiments, the polynucleotides of the invention may encode effector modules comprising IL15 as the payload comprising the nucleotide sequence of SEQ ID NOs. 6156-6160, or IL15/IL15Ra fusion polypeptide as the payload comprising the nucleotide sequence of SEQ ID NOs. 6161-6186, and/or 6187.

[0785] In some embodiments, polynucleotides of the present invention may encode a fusion polypeptide comprising a destabilizing domain (DD) and at least one immunotherapeutic agent taught herein. The DD domain may be a FKBP mutant encoded by nucleotide sequence of SEQ ID NO. 6188-6193, hDHFR mutant encoded by nucleotide sequence of SEQ ID NO. 6194-6204, 3105, and/or 2586-6240.

[0786] In some embodiments, the polynucleotides of the invention may encode effector modules comprising IL12 as the payload encoded by the nucleotide sequence SEQ ID NO. 6241-6249, or IL15 as the payload comprising the nucleotide sequence of SEQ ID NO. 6250, 6251 or 6252-6254.

[0787] In some embodiments, polynucleotides of the present invention may encode a fusion polypeptide comprising a destabilizing domain (DD) and at least one immunotherapeutic agent taught herein. The DD domain may be a FKBP mutant encoded by nucleotide sequence of SEQ ID NOS. 6255-6257, and/or 6258-6269, an ecDHFR mutant encoded by nucleotide sequence of SEQ ID NO. 6270-6272, and/or 6273-6281, hDHFR mutant encoded by nucleotide sequence of SEQ ID NO. 6282-6295, SEQ ID NO. 6296-6331, and/or 6332-6344, 6345-6347.

[0788] In some embodiments, the polynucleotides of the invention may encode effector modules comprising IL2 as the payload comprising the nucleotide sequence of SEQ ID NO. 6348-6350, or caspase 9 as the payload comprising the nucleotide sequence of SEQ ID NO. 6351-6359, or FOXP3 as the payload, comprising the nucleotide sequence of SEQ ID NO. 6360-6369 or luciferase as the payload comprising the nucleotide sequence of SEQ ID NO. 2703 and 3061, or BCMA CAR as the payload comprising the nucleotide sequence of SEQ ID NO. 6370-6372 or Her2 as the payload comprising the nucleotide sequence of 907.

### Cells

[0789] In accordance with the present invention, cells genetically modified to express at least one biocircuit, SRE (e.g. DD), effector module and immunotherapeutic agent of the invention, are provided. Cells of the invention may include, without limitation, immune cells, stem cells and tumor cells. In some embodiments, immune cells are immune effector cells, including, but not limiting to, T cells such as CD8⁺ T cells and CD4⁺ T cells (e.g., Th1, Th2, Th17, Foxp3+ cells), memory T cells such as T memory stem cells, central T memory cells, and effector memory T cells, terminally differentiated effector T cells, natural killer (NK) cells, NK T cells, tumor infiltrating lymphocytes (TILs), cytotoxic T lymphocytes (CTLs), regulatory T cells (Tregs), and dendritic cells (DCs), other immune cells that can elicit an effector function, or the mixture thereof. T cells may be Tap cells and Tγδ cells. In some embodiments, stem cells may be from human embryonic stem cells, mesenchymal stem cells, and neural stem cells. In some embodiments, T cells may be depleted endogenous T cell receptors (See U.S. Pat. No. 9,273,283; 9,181,527; and 9,028,812; the contents of each of which are incorporated herein by reference in their entirety).

[0790] In some embodiments, cells of the invention may be autologous, allogeneic, syngeneic, or xenogeneic in relation to a particular individual subject.

[0791] In some embodiments, cells of the invention may be mammalian cells, particularly human cells. Cells of the invention may be primary cells or immortalized cell lines.

[0792] In some embodiments, cells of the invention may include expansion factors as payload to trigger proliferation and expansion of the cells. Exemplary payloads include RAS such as KRAS, NRAS, RRAS, RRAS2, MRAS, ERAS, and HRAS, DIRAS such as DIRAS1, DIRAS2, and DIRAS3, NKIRAS such as NKIRAS1, and NKIRAS2, RAL such as RALA, and RALB, RAP such as RAP1A, RAP1B, RAP2A, RAP2B, and RAP2C, RASD such as RASD1, and RASD2, RASL such as RASL10A, RASL10B, RASL11A, RASL11B, and RASL12, REM such as REM1, and REM2, GEM, RERG, RERGL, and RRAD.

[0793] In some embodiments, cells of the invention may be expanded using expansion factors to trigger proliferation and expansion of the cells. Exemplary expansion factors include RAS such as KRAS, NRAS, RRAS, RRAS2, MRAS, ERAS, and HRAS, DIRAS such as DIRAS1, DIRAS2, and DIRAS3, NKIRAS such as NKIRAS1, and NKIRAS2, RAL such as RALA, and RALB, RAP such as RAP1A, RAP1B, RAP2A, RAP2B, and RAP2C, RASD such as RASD1, and RASD2, RASL such as RASL10A, RASL10B, RASL11A, RASL11B, and RASL12, REM such as REM1, and REM2, GEM, RERG, RERGL, and RRAD.

[0794] Engineered immune cells can be accomplished by transducing a cell compositions with a polypeptide of a biocircuit, an effector module, a SRE and/or a payload of interest (i.e., immunotherapeutic agent), or a polynucleotide encoding said polypeptide, or a vector comprising said polynucleotide. The vector may be a viral vector such as a lentiviral vector, a gamma-retroviral vector, a recombinant AAV, an adenoviral vector and an oncolytic viral vector. In other aspects, non-viral vectors for example, nanoparticles and liposomes may also be used. In some embodiments, immune cells of the invention are genetically modified to express at least one immunotherapeutic agent of the invention which is tunable using a stimulus. In some examples, two, three or more immunotherapeutic agents constructed in the same biocircuit and effector module are introduced into a cell. In other examples, two, three, or more biocircuits, effector modules, each of which comprises an immunotherapeutic agent, may be introduced into a cell.

[0795] In some embodiments, T cells expressing Chimeric antigen receptors (CARs) or T cells receptors (TCRs) may be further modified to express another one, two, three or more immunotherapeutic agents of the present invention. The immunotherapeutic agents may be another a cytokine such as IL2, IL12, IL15 and IL18; a regulatory switch; or a safety switch gene (e.g., a suicide gene) that kills activated T cells when a severe event is observed after adoptive cell transfer or when the transferred immune cells are no-longer needed. These molecules may be included in the same effector module or in separate effector modules.

[0796] In some embodiments, immune cells of the invention may be T cells modified to express an antigen-specific T cell receptor (TCR), or an antigen specific chimeric antigen receptor (CAR) taught herein (known as CAR T cells). Accordingly, at least one polynucleotide encoding a CAR system (or a TCR) described herein, or a vector comprising the polynucleotide is introduced into a T cell. The T cell expressing the CAR or TCR binds to a specific antigen via the extracellular targeting moiety of the CAR or TCR, thereby a signal via the intracellular signaling domain (s) is transmitted into the T cell, and as a result, the T cell is activated. The activated CAR T cell changes its behavior including release of a cytotoxic cytokine (e.g., a tumor necrosis factor, and lymphotoxin, etc.), improvement of a cell proliferation rate, change in a cell surface molecule, or the like. Such changes cause destruction of a target cell expressing the antigen recognized by the CAR or TCR. In addition, release of a cytokine or change in a cell surface molecule stimulates other immune cells, for example, a B cell, a dendritic cell, a NK cell, and a macrophage.

[0797] The CAR introduced into a T cell may be a first-generation CAR including only the intracellular signaling domain from TCR CD3zeta, or a second-generation CAR including the intracellular signaling domain from TCR CD3zeta and a costimulatory signaling domain, or a third-generation CAR including the intracellular signaling domain from TCR CD3zeta and two or more costimulatory signaling domains, or a split CAR system, or an on/off switch CAR system. In one example, the expression of the CAR or TCR is controlled by a destabilizing domain (DD) such as a hDHFR mutant, in the effector module of the invention. The presence or absence of hDHFR binding ligand such as TMP is used to tune the CAR or TCR expression in transduced T cells or NK cells.

[0798] In some embodiments, CAR T cells of the invention may be further modified to express another one, two, three or more immunotherapeutic agents. The immunotherapeutic agents may be another CAR or TCR specific to a different target molecule; a cytokine such as IL2, IL12, IL15 and IL18, or a cytokine receptor such as IL15Ra; a chimeric switch receptor that converts an inhibitory signal to a stimulatory signal; a homing receptor that guides adoptively transferred cells to a target site such as the tumor tissue; an agent that optimizes the metabolism of the immune cell; or a safety switch gene (e.g., a suicide gene) that kills activated T cells when a severe event is observed after adoptive cell transfer or when the transferred immune cells are no-longer needed. These molecules may be included in the same effector module or in separate effector modules.

[0799] In one embodiment, the Chimeric antigen receptor expressing T cell (including TCR T cell) may be an “armed” CAR T cell which is transformed with a CAR and an effector module comprising a cytokine. The inducible or constitutively secrete active cytokines further armor CAR T cells to improve efficacy and persistence. In this context, such CAR T cell is also referred to as “armored CAR T cell”. The “armor” molecule may be selected based on the tumor microenvironment and other elements of the innate and adaptive immune systems. In some embodiments, the molecule may be a stimulatory factor such as IL2, IL12, IL15, IL18, type I IFN, CD40L and 4-1BBL which have been shown to further enhance CAR T cell efficacy and persistence in the face of a hostile tumor microenvironment via different mechanisms (Yeku et al., Biochem Soc Trans., 2016, 44(2): 412-418). In one embodiment, the cytokine may be IL12. Such T cells, after CAR mediated activation in the tumor, release inducible IL12 which augments T-cell activation and attracts and activates innate immune cells to eliminate CD19-negative cancer cells.

[0800] In one embodiment, the CAR T cell (including TCR T cell) of the invention may be an “armed” CAR T cell which is transformed with an effector module comprising a CAR and an effector module comprising a cytokine. The inducible or constitutively secrete active cytokines further armor CAR T cells to improve efficacy and persistence. In this context, such CAR T cell is also referred to as “armored CAR T cell”. The “armor” molecule may be selected based on the tumor microenvironment and other elements of the innate and adaptive immune systems. In some embodiments, the molecule may be a stimulatory factor such as IL2, IL12, IL15, IL18, type I IFN, CD40L and 4-1BBL which have been shown to further enhance CAR T cell efficacy and persistence in the face of a hostile tumor microenvironment via different mechanisms (Yeku et al., Biochem Soc Trans., 2016, 44(2): 412-418).

[0801] In some aspects, the armed CAR T cell of the invention is modified to express a CD19 CAR and IL12. Such T cells, after CAR mediated activation in the tumor, release inducible IL12 which augments T-cell activation and attracts and activates innate immune cells to eliminate CD19-negative cancer cells.

[0802] In one embodiment, T cells of the invention may be modified to express an effector module comprising a CAR and an effector module comprising a suicide gene.

[0803] In one embodiment, the CAR T cell (including TCR T cell) of the invention may be transformed with effector modules comprising a cytokine and a safety switch gene (e.g., suicide gene). The suicide gene may be an inducible caspase such as caspase 9 which induces apoptosis, when activated by an extracellular stimulus of a biocircuit system. Such induced apoptosis eliminates transferred cell as required to decrease the risk of direct toxicity and uncontrolled cell proliferation.

[0804] In some embodiments, immune cells of the invention may be NK cells modified to express an antigen-specific T cell receptor (TCR), or an antigen specific chimeric antigen receptor (CAR) taught herein.

[0805] In some embodiments, immune cells of the invention may be NK cells modified to payloads and effector modules taught herein.

[0806] In some embodiments, immune cells of the invention may be NK cells modified to express payloads of the invention.

[0807] Natural killer (NK) cells are members of the innate lymphoid cell family and characterized in humans by expression of the phenotypic marker CD56 (neural cell adhesion molecule) in the absence of CD3 (T-cell co-receptor). NK cells are potent effector cells of the innate immune system which mediate cytotoxic attack without the requirement of prior antigen priming, forming the first line of defense against diseases including cancer malignancies and viral infection.

[0808] Several pre-clinical and clinical trials have demonstrated that adoptive transfer of NK cells is a promising treatment approach against cancers such as acute myeloid leukemia (Ruggeri et al., Science; 2002, 295: 2097-2100; and Geller et al., Immunotherapy, 2011, 3: 1445-1459). Adoptive transfer of NK cells expressing CAR such as DAP12-Based Activating CAR revealed improved eradication of tumor cells (Topfer et al., J Immunol. 2015; 194:3201-3212). NK cell engineered to express a CS-1 specific CAR also displayed enhanced cytolysis and interferon-γ (IFN-γ) production in multiple myeloma (Chu et al., Leukemia, 2014, 28(4): 917-927).

[0809] NK cell activation is characterized by an array of receptors with activating and inhibitory functions. The important activation receptors on NK cells include CD94/NKG2C and NKG2D (the C-type lectin-like receptors), and the natural cytotoxicity receptors (NCR) NKp30, NKp44 and NKp46, which recognize ligands on tumor cells or virally infected cells. NK cell inhibition is essentially mediated by interactions of the polymorphic inhibitory killer cell immunoglobulin-like receptors (KIRs) with their cognate human-leukocyte-antigen (HLA) ligands via the alpha-1 helix of the HLA molecule. The balance between signals that are generated from activating receptors and inhibitory receptors mainly determines the immediate cytotoxic activation.

[0810] NK cells may be isolated from peripheral blood mononuclear cells (PBMCs), or derived from human embryonic stem (ES) cells and induced pluripotent stem cells (iPSCs). The primary NK cells isolated from PBMCs may be further expanded for adoptive immunotherapy. Strategies and protocols useful for the expansion of NK cells may include interleukin 2 (IL2) stimulation and the use of autologous feeder cells, or the use of genetically modified allogeneic feeder cells. In some aspects, NK cells can be selectively expanded with a combination of stimulating ligands including IL15, IL21, IL2, 41BBL, IL12, IL18, MICA, 2B4, LFA-1, and BCM1/SLAMF2 (e.g., US patent publication NO: US20150190471).

[0811] Immune cells expressing effector modules comprising a CAR and/or other immunotherapeutic agents can be used as cancer immunotherapy. The immunotherapy comprises the cells expressing a CAR and/or other immunotherapeutic agents as an active ingredient, and may further comprise a suitable excipient. Examples of the excipient may include the aforementioned pharmaceutically acceptable excipients, including various cell culture media, and isotonic sodium chloride.

[0812] In some embodiments, cells of the present invention may be utilized as artificial antigen presenting cells to propagate and activate clinical grade T cells or NK cells for immunotherapy. As a non-limiting example, K562 erythroleukemia cells may be used for this purpose.

[0813] In some embodiments, cells of the present invention may be dendritic cells that are genetically modified to express the compositions of the invention. Such cells may be used as cancer vaccines.

[0814] In some embodiments, cells of the invention may be Treg cells. Payloads of the invention may be used to promote the proliferation, survival, activation and/or function of T regulatory cells. Tregs are a distinct population of cells that are positively selected on high affinity ligands in the thymus and play an important role in the tolerance to self-antigens. In addition, T regs have also been shown to play a role in peripheral tolerance to foreign antigens. The ability of Tregs to induce tolerance may be utilized to tune immune responses to the immunotherapeutic agents described herein. Methods for expanding Tregs for immunotherapy have been described by Tang et al., 2004, J. Exp. Med. 199: 1455-65; Battaglia et al., 2005, Blood 105: 4743-48; Earle et al., 2005, Clin. Immunol. 115: 3-9; Godfrey et al., 2004, Blood 104: 453-61; Hoffmann et al., 2004, Blood 104: 895-903.

### Methods of CD19 Antibody Development and Characterization

[0815] In some embodiments, the present invention provides methods of producing CD19 antibodies, antibody fragments or variants. Such methods may include the steps of: (1) preparing a composition with CD19, (2) contacting a library of antibodies or antibody fragments or variable with the composition, and (3) identifying one or more CD19 antibodies. Also, provided herein are methods for identifying FMC63-distinct CD19 antibodies, antibody fragments or variable.

[0816] In some embodiments, the present invention provides methods of identifying CD19 scFvs. Such methods may involve screening phagemid libraries for CD19 scFvs. Phagemid libraries expressing recombinant scFvs associated with the surface of bacteria or bacteriophages are useful in the present inventions. Phagemid libraries may be generated by PCR implication of the polynucleotides encoding the heavy chain and the kappa light chain of the immunoglobulin IgM and infecting Cre recombinase positive bacteria with the vectors containing the PCR products at a high multiplicity of infection (MOI). The high MOI results in bacteria containing multiple phagemids, each of which encodes a different VH and VL genes, which can be recombined by the Cre recombinase. The resulting library that may be generated by recombination is approximately 10⁸ unique scFvs. In some instances, libraries of CD19 scFvs formatted into chimeric antigen receptor constructs may be screened to identify CD19scFvs useful in the present invention.

[0817] In some embodiments, scFvs immunologically specific to CD19 may be identified using cells that ectopically express full length, a fragment or a portion of CD19. Cell lines with low endogenous CD19 expression may be selected for ectopic expression. In some embodiments, the CD19 may be a naturally occurring isoform of human CD19.

[0818] In some embodiments, fusion proteins comprising the extracellular domains of CD19 (i.e. exon 1-exon 4) fused to the Fc region of human IgG1 (CD19sIg) are utilized to identify CD19 specific scFvs. Such fusion proteins have been described by Oliveira et al (2013) Journal of Translational Medicine 11:23; the contents of which are incorporated herein by reference in their entirety.

[0819] Also, provided herein are methods to identify FMC63-distinct scFvs, which include scFvs that are immunologically specific to and bind to an epitope of the CD19 antigen that is different or unlike the epitope of CD19 antigen that is bound by FMC63. In some embodiments, FMC63-distinct scFvs are identified by screening the scFv library with a complex consisting of human CD19 bound to FMC63. The CD19 of Rhesus macaque (Macaca mulatta) herein referred to as Rhesus CD19, bears 88% homology to the human CD19. Despite this high degree of homology, the Rhesus CD19 is not recognized by FMC63, indicating that the FMC63 epitope is in the region of human CD19 that is non-homologous to Rhesus CD19. Thus, in some embodiments, Rhesus CD19 may be used to screen scFv libraries for FMC63-distinct scFvs. Mutations in the region of Rhesus CD19 that is non-homologous to the human CD19 have been previously utilized to identify residues of human CD19 that confer binding to FMC63 (Sommermeyer et al. (2017) Leukemia February 16. doi: 10.1038/leu.2017.57). In some embodiments, the mutational analysis described by Sommermeyer et al. may be utilized to design human CD19 mutants that are unable to bind to FMC63. Such mutants may include human CD19 (H218R, A237D, M243V, E244D, P250T) and human CD19 (H218R, A237D) and may be utilized to screen scFv libraries for FMC63-distinct scFvs. Sotillo et al have identified a splice variant of human CD19 lacking exon 2 in cancer patients (Sotillo et al. (2015) Cancer Discov. 2015 December; 5(12):1282-95). The splice variant lacking exon 2 is not recognized by FMC63 and may also be used to screen scFv libraries for FMC63-distinct scFvs.

[0820] CD19 IgG fusion molecules generated by fusing the Fc region of human IgG1 with the human CD19-complete extracellular domains, i.e., exons 1-4 (CD19sIgG1-4) or extracellular domains lacking exon 2, i.e., exons 1, 3 and 4 (CD19sIgG1,3,4) may also be utilized to screen scFv libraries for FMC63-distinct scFvs.

[0821] CD19 proteins, variants and mutants useful in the invention are provided in Table 42.

TABLE 42
CD19 proteins, variants and mutants

| Description | Sequence | SEQ ID NO |
|---|---|---|
| Human CD19, Isoform 1 | MPPPRLLFFLLFLTPMEVRPEEPLVVKVEEGDNAVLQCLKGTSDGPTQQ | 3061 |
| (NCBI Reference No. | LTWSRESPLKPFLKLSLGLPGLGIHMRPLAIWLFIFNVSQQMGGFYLCQ | |
| NP_001171569.1) | PGPPSEKAWQPGWTVNVEGSGELFRWNVSDLGGLGCGLKNRSSEGPSSP | |
| | SGKLMSPKLYVWAKDRPEIWEGEPPCLPPRDSLNQSLSQDLTMAPGSTL | |
| | WLSCGVPPDSVSRGPLSWTHVHPKGPKSLLSLELKDDRPARDMWVMETG | |
| | LLLPRATAQDAGKYYCHRGNLTMSFHLEITARPVLWHWLLRTGGWKVSA | |
| | VTLAYLIFCLCSLVGILHLQRALVLRRKRKRMTDPTRRFFKVTPPPGSG | |
| | PQNQYGNVLSLPTPTSGLGRAQRWAAGLGGTAPSYGNPSSDVQADGALG | |
| | SRSPPGVGPEEEEGEGYEEPDSEEDSEFYENDSNLGQDQLSQDGSGYEN | |
| | PEDEPLGPEDEDSFSNAESYENEDEELTQPVARTMDFLSPHGSAWDPSR | |
| | EATSLAGSQSYEDMRGILYAAPQLRSIRGQPGPNHEEDADSYENMDNPD | |
| | GPDPAWGGGGRMGTWSTR | |
| Human CD19, Isoform 2 | MPPPRLLFFLLFLTPMEVRPEEPLVVKVEEGDNAVLQCLKGTSDGPTQQ | 3062 |
| (NCBI Reference No. | LTWSRESPLKPFLKLSLGLPGLGIHMRPLAIWLFIFNVSQQMGGFYLCQ | |
| NP_001761.3) | PGPPSEKAWQPGWTVNVEGSGELFRWNVSDLGGLGCGLKNRSSEGPSSP | |
| | SGKLMSPKLYVWAKDRPEIWEGEPPCLPPRDSLNQSLSQDLTMAPGSTL | |
| | WLSCGVPPDSVSRGPLSWTHVHPKGPKSLLSLELKDDRPARDMWVMETG | |
| | LLLPRATAQDAGKYYCHRGNLTMSFHLEITARPVLWHWLLRTGGWKVSA | |
| | VTLAYLIFCLCSLVGILHLQRALVLRRKRKRMTDPTRRFFKVTPPPGSG | |
| | PQNQYGNVLSLPTPTSGLGRAQRWAAGLGGTAPSYGNPSSDVQADGALG | |
| | SRSPPGVGPEEEEGEGYEEPDSEEDSEFYENDSNLGQDQLSQDGSGYEN | |
| | PEDEPLGPEDEDSFSNAESYENEDEELTQPVARTMDFLSPHGSAWDPSR | |
| | EATSLGSQSYEDMRGILYAAPQLRSIRGQPGPNHEEDADSYENMDNPDG | |
| | PDPAWGGGGRMGTWSTR | |
| Rhesus CD19 | MPPPCLLFFLLFLTPMEVRPQEPLVVKVEEGDNAVLQCLEGTSDGPTQQ | 3063 |
| (Uniprot ID: F7F486) | LVWCRDSPFEPFLNLSLGLPGMGIRMGPLGIWLLIFNVSNQTGGFYLCQ | |
| | PGLPSEKAWQPGWTVSVEGSGELFRWNVSDLGGLGCGLKNRSSEGPSSP | |
| | SGKLNSSQLYVWAKDRPEMWEGEPVCGPPRDSLNQSLSQDLTMAPGSTL | |
| | WLSCGVPPDSVSRGPLSWTHVRPKGPKSSLLSLELKDDRPDRDMWVVDT | |
| | GLLLTRATAQDAGKYYCHRGNWTKSFYLEITARPALWHWLLRIGGWKVP | |
| | AVTLTYLIFCLCSLVGILQLQRALVLRRKRKRMTDPTRRFFKVTPPPGS | |
| | GPQNQYGNVLSLPTPTSGLGRAQRWAAGLGGTAPSYGNPSSDVQVDGAV | |
| | GSRSPPGAGPEEEEGEGYEEPDSEEGSEFYENDSNFGQDQLSQDGSGYE | |
| | NPEDEPLGPEDEDSFSNAESYENEDEELTQPVARTMDFLSPHGSAWDPS | |
| | REATSLGSQSYEDMRGLLYAAPQLRTIRGQPGPNHEEDADSYENMDNPD | |
| | GPDPAWGGGGRMGTWSAR | |
| Human CD19 (H218R, | MPPPRLLFFLLFLTPMEVRPEEPLVVKVEEGDNAVLQCLKGTSDGPTQQ | 3064 |
| A237D, M243V, E244D, | LTWSRESPLKPFLKLSLGLPGLGIHMRPLAIWLFIFNVSQQMGGFYLCQ | |
| P250T) | PGPPSEKAWQPGWTVNVEGSGELFRWNVSDLGGLGCGLKNRSSEGPSSP | |
| | SGKLMSPKLYVWAKDRPEIWEGEPPCLPPRDSLNQSLSQDLTMAPGSTL | |
| | WLSCGVPPDSVSRGPLSWTHVRPKGPKSLLSLELKDDRPDRDMWVVDTG | |
| | LLLTRATAQDAGKYYCHRGNLTMSFHLEITARPVLWHWLLRTGGWKVSA | |
| | VTLAYLIFCLCSLVGILHLQRALVLRRKRKRMTDPTRRFFKVTPPPGSG | |
| | PQNQYGNVLSLPTPTSGLGRAQRWAAGLGGTAPSYGNPSSDVQADGALG | |
| | SRSPPGVGPEEEEGEGYEEPDSEEDSEFYENDSNLGQDQLSQDGSGYEN | |
| | PEDEPLGPEDEDSFSNAESYENEDEELTQPVARTMDFLSPHGSAWDPSR | |
| | EATSLAGSQSYEDMRGILYAAPQLRSIRGQPGPNHEEDADSYENMDNPD | |
| | GPDPAWGGGGRMGTWSTR | |
| Human CD19 (H218R, | MPPPRLLFFLLFLTPMEVRPEEPLVVKVEEGDNAVLQCLKGTSDGPTQQ | 3065 |
| A237D) | LTWSRESPLKPFLKLSLGLPGLGIHMRPLAIWLFIFNVSQQMGGFYLCQ | |
| | PGPPSEKAWQPGWTVNVEGSGELFRWNVSDLGGLGCGLKNRSSEGPSSP | |
| | SGKLMSPKLYVWAKDRPEIWEGEPPCLPPRDSLNQSLSQDLTMAPGSTL | |
| | WLSCGVPPDSVSRGPLSWTHVRPKGPKSLLSLELKDDRPDRDMWVMETG | |
| | LLLPRATAQDAGKYYCHRGNLTMSFHLEITARPVLWHWLLRTGGWKVSA | |
| | VTLAYLIFCLCSLVGILHLQRALVLRRKRKRMTDPTRRFFKVTPPPGSG | |
| | PQNQYGNVLSLPTPTSGLGRAQRWAAGLGGTAPSYGNPSSDVQADGALG | |
| | SRSPPGVGPEEEEGEGYEEPDSEEDSEFYENDSNLGQDQLSQDGSGYEN | |
| | PEDEPLGPEDEDSFSNAESYENEDEELTQPVARTMDFLSPHGSAWDPSR | |
| | EATSLAGSQSYEDMRGILYAAPQLRSIRGQPGPNHEEDADSYENMDNPD | |
| | GPDPAWGGGGRMGTWSTR | |
| Human CD19 (Delta | MPPPRLLFFLLFLTPMEVRPEEPLVVKVEGELFRWNVSDLGGLGCGLKN | 3066 |
| exon 2) | RSSEGPSSPSGKLMSPKLYVWAKDRPEIWEGEPPCLPPRDSLNQSLSQD | |
| | LTMAPGSTLWLSCGVPPDSVSRGPLSWTHVHPKGPKSLLSLELKDDRPA | |
| | RDMWVMETGLLLPRATAQDAGKYYCHRGNLTMSFHLEITARPVLWHWLL | |
| | RTGGWKVSAVTLAYLIFCLCSLVGILHLQRALVLRRKRKRMTDPTRRFF | |
| | KVTPPPGSGPQNQYGNVLSLPTPTSGLGRAQRWAAGLGGTAPSYGNPSS | |
| | DVQADGALGSRSPPGVGPEEEEGEGYEEPDSEEDSEFYENDSNLGQDQL | |
| | SQDGSGYENPEDEPLGPEDEDSFSNAESYENEDEELTQPVARTMDFLSP | |
| | HGSAWDPSREATSLGSQSYEDMRGILYAAPQLRSIRGQPGPNHEEDADS | |
| | YENMDNPDGPDPAWGGGGRMGTWSTR | |
| Human CD19 (Exon 1-4) | MPPPRLLFFLLFLTPMEVRPEEPLVVKVEEGDNAVLQCLKGTSDGPTQQ | 3067 |
| | LTWSRESPLKPFLKLSLGLPGLGIHMRPLAIWLFIFNVSQQMGGFYLCQ | |
| | PGPPSEKAWQPGWTVNVEGSGELFRWNVSDLGGLGCGLKNRSSEGPSSP | |
| | SGKLMSPKLYVWAKDRPEIWEGEPPCLPPRDSLNQSLSQDLTMAPGSTL | |
| | WLSCGVPPDSVSRGPLSWTHVHPKGPKSLLSLELKDDRPARDMWVMETG | |
| | LLLPRATAQDAGKYYCHRGNLTMSFHLEITARP | |
| Human CD19 (Exon | MPPPRLLFFLLFLTPMEVRPEEPLVVKVEGELFRWNVSDLGGLGCGLKN | 3068 |
| 1, 3, 4) | RSSEGPSSPSGKLMSPKLYVWAKDRPEIWEGEPPCLPPRDSLNQSLSQD | |
| | LTMAPGSTLWLSCGVPPDSVSRGPLSWTHVHPKGPKSLLSLELKDDRPA | |
| | RDMWVMETGLLLPRATAQDAGKYYCHRGNLTMSFHLEITARP | |

### III. PHARMACEUTICAL COMPOSITIONS AND FORMULATIONS

[0822] The present invention further provides pharmaceutical compositions comprising one or more biocircuits, effector modules, SREs (e.g., DDs), stimuli and payloads of interest (i.e., immunotherapeutic agents), vectors, cells and other components of the invention, and optionally at least one pharmaceutically acceptable excipient or inert ingredient.

[0823] As used herein the term “pharmaceutical composition” refers to a preparation of biocircuits, SREs, stimuli and payloads of interest (i.e., immunotherapeutic agents), other components, vectors, cells and described herein, or pharmaceutically acceptable salts thereof, optionally with other chemical components such as physiologically suitable carriers and excipients. The pharmaceutical compositions of the invention comprise an effective amount of one or more active compositions of the invention. The preparation of a pharmaceutical composition that contains at least one composition of the present invention and/or an additional active ingredient will be known to those skilled in the art in light of the present disclosure, as exemplified by Remington's Pharmaceutical Sciences, 18th Ed. Mack Printing Company, 1990, incorporated herein by reference.

[0824] The term “excipient” or “inert ingredient” refers to an inactive substance added to a pharmaceutical composition and formulation to further facilitate administration of an active ingredient. For the purposes of the present disclosure, the phrase “active ingredient” generally refers to any one or more biocircuits, effector modules, SREs, stimuli and payloads of interest (i.e., immunotherapeutic agents), other components, vectors, and cells to be delivered as described herein. The phrases “pharmaceutically acceptable” refers to molecular entities and compositions that do not produce an adverse, allergic or other untoward reaction when administered to an animal, such as, for example, a human, as appropriate.

[0825] In some embodiments, pharmaceutical compositions and formulations are administered to humans, human patients or subjects. Although the descriptions of pharmaceutical compositions provided herein are principally directed to pharmaceutical compositions which are suitable for administration to humans, it will be understood by the skilled artisan that such compositions are generally suitable for administration to any other animal, e.g., to non-human animals, e.g. non-human mammals. Subjects to which administration of the pharmaceutical compositions is contemplated include, but are not limited to, non-human mammals, including agricultural animals such as cattle, horses, chickens and pigs, domestic animals such as cats, dogs, or research animals such as mice, rats, rabbits, dogs and non-human primates. It will be understood that, for human administration, preparations should meet sterility, pyrogenicity, general safety and purity standards as required by FDA Office of Biological Standards.

[0826] A pharmaceutical composition and formulation in accordance with the invention may be prepared, packaged, and/or sold in bulk, as a single unit dose, and/or as a plurality of single unit doses. As used herein, a “unit dose” is discrete amount of the pharmaceutical composition comprising a predetermined amount of the active ingredient. The amount of the active ingredient is generally equal to the dosage of the active ingredient which would be administered to a subject and/or a convenient fraction of such a dosage such as, for example, one-half or one-third of such a dosage.

[0827] The compositions of the present invention may be formulated in any manner suitable for delivery. The formulation may be, but is not limited to, nanoparticles, poly (lactic-co-glycolic acid) (PLGA) microspheres, lipidoids, lipoplex, liposome, polymers, carbohydrates (including simple sugars), cationic lipids and combinations thereof.

[0828] In one embodiment, the formulation is a nanoparticle which may comprise at least one lipid. The lipid may be selected from, but is not limited to, DLin-DMA, DLin-K-DMA, 98N12-5, C12-200, DLin-MC3-DMA, DLin-KC2-DMA, DODMA, PLGA, PEG, PEG-DMG and PEGylated lipids. In another aspect, the lipid may be a cationic lipid such as, but not limited to, DLin-DMA, DLin-D-DMA, DLin-MC3-DMA, DLin-KC2-DMA and DODMA.

[0829] For polynucleotides of the invention, the formulation may be selected from any of those taught, for example, in International Application PCT/US2012/069610, the contents of which are incorporated herein by reference in its entirety.

[0830] Relative amounts of the active ingredient, the pharmaceutically acceptable excipient or inert ingredient, and/or any additional ingredients in a pharmaceutical composition in accordance with the invention will vary, depending upon the identity, size, and/or condition of the subject treated and further depending upon the route by which the composition is to be administered. By way of example, the composition may comprise between 0.1 and 100, e.g., between 0.5 and 50, between 1-30, between 5-80, at least 80 (w/w) active ingredient.

[0831] Efficacy of treatment or amelioration of disease can be assessed, for example by measuring disease progression, disease remission, symptom severity, reduction in pain, quality of life, dose of a medication required to sustain a treatment effect, level of a disease marker or any other measurable parameter appropriate for a given disease being treated or targeted for prevention. It is well within the ability of one skilled in the art to monitor efficacy of treatment or prevention by measuring any one of such parameters, or any combination of parameters. In connection with the administration of compositions of the present invention, “effective against” for example a cancer, indicates that administration in a clinically appropriate manner results in a beneficial effect for at least a statistically significant fraction of patients, such as an improvement of symptoms, a cure, a reduction in disease load, reduction in tumor mass or cell numbers, extension of life, improvement in quality of life, or other effect generally recognized as positive by medical doctors familiar with treating the particular type of cancer.

[0832] A treatment or preventive effect is evident when there is a statistically significant improvement in one or more parameters of disease status, or by a failure to worsen or to develop symptoms where they would otherwise be anticipated. As an example, a favorable change of at least 10 in a measurable parameter of disease, and preferably at least 20, 30, 40, 50 or more can be indicative of effective treatment. Efficacy for a given composition or formulation of the present invention can also be judged using an experimental animal model for the given disease as known in the art. When using an experimental animal model, efficacy of treatment is evidenced when a statistically significant change is observed.

[0833] Preferably, the compositions of the invention are administered by injection, e.g., intravenously. When the inventive CAR material is a host cell (or a population thereof) expressing the inventive CAR, the pharmaceutically acceptable carrier for the cells for injection may include any isotonic carrier such as, for example, normal saline (about 0.90% w/v of NaCl in water, about 300 mOsm/L NaCl in water, or about 9.0 g NaCl per liter of water), NORMOSOL R electrolyte solution (Abbott, Chicago, IL), PLASMA-LYTE A (Baxter, Deerfield, IL), about 5% dextrose in water, or Ringer's lactate. In an embodiment, the pharmaceutically acceptable carrier may be supplemented with human serum albumen. Any of the carriers taught in WO2016149578A1 may be useful in the present invention.

### IV. APPLICATIONS

[0834] In one aspect of the present invention, methods for reducing a tumor volume or burden are provided. The methods comprise administering a pharmaceutically effective amount of a pharmaceutical composition comprising at least one biocircuit system, effector module, DD, and/or payload of interest (i.e., an immunotherapeutic agent), at least one vector, or cells to a subject having a tumor. The biocircuit system and effector module having any immunotherapeutic agent as described herein may be in forms of a polypeptide, or a polynucleotide such as mRNA, or a viral vector comprising the polynucleotide, or a cell modified to express the biocircuit, effector module, DD, and payload of interest (i.e., immunotherapeutic agent).

[0835] In another aspect of the present invention, methods for inducing an anti-tumor immune response in a subject are provided. The methods comprise administering a pharmaceutically effective amount of a pharmaceutical composition comprising at least one biocircuit system, effector module, DD, and/or payload of interest (i.e., an immunotherapeutic agent), at least one vector, or cells to a subject having a tumor. The biocircuit and effector module having any immunotherapeutic agent as described herein may be in forms of a polypeptide, or a polynucleotide such as mRNA, or a viral vector comprising the polynucleotide, or a cell modified to express the biocircuit, effector module, DD, and payload of interest (i.e., immunotherapeutic agent).

[0836] The methods, according to the present invention, may be adoptive cell transfer (ACT) using genetically engineered cells such as immune effector cells of the invention, cancer vaccines comprising biocircuit systems, effector modules, DDs, payloads of interest (i.e., immunotherapeutic agents) of the invention, or compositions that manipulate the tumor immunosuppressive microenvironment, or the combination thereof. These treatments may be further employed with other cancer treatment such as chemotherapy and radiotherapy.

[0837] In some embodiments, the safety switches described herein may be useful in the treatment of diseases of protein proliferation and/or protein aggregation e.g. renal diseases and/or neurological diseases such as Alzheimer's diseases, prior diseases etc. In one embodiment, safety switches of the present invention may be expressed in phagocytic cells that are engineered to target aggregated proteins such as amyloid proteins, wherein the safety switches described herein may be used to eliminate the phagocytic cells after the clearance of the aggregated proteins.

### 1. Adoptive Cell Transfer (Adoptive Immunotherapy)

[0838] In some embodiments, cells which are genetically modified to express at least one biocircuit system, effector module, DD, and/or payload of interest (immunotherapeutic agent) may be used for adoptive cell therapy (ACT). As used herein, Adoptive cell transfer refers to the administration of immune cells (from autologous, allogenic or genetically modified hosts) with direct anticancer activity. ACT has shown promise in clinical application against malignant and infectious disease. For example, T cells genetically engineered to recognize CD19 have been used to treat follicular B cell lymphoma (Kochenderfer et al., Blood, 2010, 116:4099-4102; and Kochenderfer and Rosenberg, Nat Rev Clin Oncol., 2013, 10(5): 267-276) and ACT using autologous lymphocytes genetically-modified to express anti-tumor T cell receptors has been used to treat metastatic melanoma (Rosenberg and Dudley, Curr. Opin. Immunol. 2009, 21: 233-240).

[0839] According to the present invention, the biocircuits and systems may be used in the development and implementation of cell therapies such as adoptive cell therapy. Certain effector modules useful in cell therapy are given in FIG. 7-FIG. 12. The biocircuits, their components, effector modules and their SREs and payloads may be used in cell therapies to effect CAR therapies, in the manipulation or regulation of TILs, in allogeneic cell therapy, in combination T cell therapy with other treatment lines (e.g. radiation, cytokines), to encode engineered TCRs, or modified TCRs, or to enhance T cells other than TCRs (e.g. by introducing cytokine genes, genes for the checkpoint inhibitors PD1, CTLA4).

[0840] According to the present invention, the biocircuits and systems may be used in the development and implementation of cell therapies such as adoptive cell therapy. Certain effector modules useful in cell therapy are given in FIG. 7-FIG. 12. The biocircuits, their components, effector modules and their SREs and payloads may be used in cell therapies in APC platforms for stimulating T cells, as a tool to enhance ex vivo APC stimulation, to improve methods of T cell expansion, in ex vivo stimulation with antigen, in TCR/CAR combinations, in the manipulation or regulation of TILs, in allogeneic cell therapy, in combination T cell therapy with other treatment lines (e.g. radiation, cytokines), or to enhance T cells other than TCRs (e.g. by introducing cytokine genes).

[0841] According to the present invention, the biocircuits and systems may be used in the development and implementation of cell therapies such as adoptive cell therapy. Certain effector modules useful in cell therapy are given in FIG. 7-FIG. 12. The biocircuits, their components, effector modules and their SREs and payloads may be used in cell therapies to regulate epitope tagged receptors, in APC platforms for stimulating T cells, as a tool to enhance ex vivo APC stimulation, to improve methods of T cell expansion, in ex vivo stimulation with antigen, in TCR/CAR combinations, in the manipulation or regulation of TILs, in allogeneic cell therapy, in combination T cell therapy with other treatment lines (e.g. radiation, cytokines).

[0842] In one embodiment, the biocircuits, their components, effector modules and their SREs and payloads may be used to improve methods of T cell expansion and/or methods of increasing the length of expression of a payload. The methods may include the use of CD3/CD28 dynabeads. The dynabeads used may be expander dynabeads, activator dynabeads or a combination thereof. The dynabeads may be used at a ratio of dynabeads (B) to T cells (T) of 1:1, 1:2, 1:3, 1:4, 1:5, 1:6, 1:7, 1:8, 1:9, 1:10, 2:1, 2:3, 2:5, 2:7, 2:9, 3:1, 3:2, 3:4, 3:5, 3:7, 3:8, 3:10, 4:1, 4:3, 4:5, 4:7, 4:9, 5:1, 5:2, 5:3, 5:4, 5:6, 5:7, 5:8, 5:9, 6:1, 6:5, 6:7, 7:1, 7:2, 7:3, 7:4, 7:5, 7:6, 7:8, 7:9, 7:10, 8:1, 8:3, 8:5, 8:7, 8:9, 9:1, 9:2, 9:4, 9:5, 9:7, 9:8, 9:10, 10:1, 10:3, 10:7, and 10:9. In one embodiment, the B:T ratio is 3:1. In one embodiment, the B:T ratio is 1:1. In one embodiment, the B:T ratio is 1:2. In one embodiment, the B:T ratio is 1:3. In one embodiment, the B:T ratio is 2:1. As a non-limiting example, expander dynabeads are used at a B:T ratio of 3:1 and activator dynabeads are used at a B:T ratio of 3:1. As a non-limiting example, expander dynabeads are used at a B:T ratio of 2:1 and activator dynabeads are used at a B:T ratio of 3:1. As a non-limiting example, expander dynabeads are used at a B:T ratio of 1:1 and activator dynabeads are used at a B:T ratio of 3:1.

[0843] In some embodiments, the compositions of the present invention may be utilized to alter TIL (tumor infiltrating lymphocyte) populations in a subject. In one embodiment, any of the payloads described herein may be utilized to change the ratio of CD4 positive cells to CD8 positive populations. In some embodiments, TILs may be sorted ex vivo and engineered to express any of the cytokines described herein. Payloads of the invention e.g. IL15 or IL15-IL15Ra may be used to expand CD4 and/or CD8 populations of TILs to enhance TIL mediated immune response.

[0844] In some embodiments, the compositions of the present invention may be utilized to alter TIL (tumor infiltrating lymphocyte) populations in a subject. In one embodiment, any of the payloads described herein may be utilized to change the ratio of CD4 positive cells to CD8 positive populations. In some embodiments, TILs may be sorted ex vivo and engineered to express any of the cytokines described herein. Payloads of the invention e.g. IL12 may be used to expand CD4 and/or CD8 populations of TILs to enhance TIL mediated immune response. In some embodiments, compositions of the present invention may be used to enhance anti-tumor activity of chimeric antigen receptor e.g. CD19 CAR and MUC16 CAR and prolong survival in tumor bearing subjects (Koneru, et al. Oncoimmunology 2015 March; 4(3): e994446; the contents of which are incorporated by reference in its entirety).

[0845] Provided herein are methods for use in adoptive cell therapy. The methods involve preconditioning a subject in need thereof, modulating immune cells with SRE, biocircuits and compositions of the present invention, administering to a subject, engineered immune cells expressing compositions of the invention and the successful engraftment of engineered cells within the subject.

[0846] In some embodiments, SREs, biocircuits and compositions of the present invention may be used to minimize preconditioning regimens associated with adoptive cell therapy. As used herein “preconditioning” refers to any therapeutic regimen administered to a subject to improve the outcome of adoptive cell therapy. Preconditioning strategies include, but are not limited to total body irradiation and/or lymphodepleting chemotherapy. Adoptive therapy clinical trials without preconditioning have failed to demonstrate any clinical benefit, indicating its importance in ACT. Yet, preconditioning is associated with significant toxicity and limits the subject cohort that is suitable for ACT. In some instances, immune cells for ACT may be engineered to express payloads of the invention, for example, cytokines such as IL12 and IL15 as payload using SREs of the present invention to reduce the need for preconditioning (Pengram et al. (2012) Blood 119 (18): 4133-41; the contents of which are incorporated by reference in their entirety).

[0847] In some embodiments, SREs, biocircuits and compositions of the present invention may be used to minimize preconditioning regimens associated with adoptive cell therapy. As used herein “preconditioning” refers to any therapeutic regimen administered to a subject to improve the outcome of adoptive cell therapy. Preconditioning strategies include, but are not limited to total body irradiation and/or lymphodepleting chemotherapy. Adoptive therapy clinical trials without preconditioning have failed to demonstrate any clinical benefit, indicating its importance in ACT. Yet, preconditioning is associated with significant toxicity and limits the subject cohort that is suitable for ACT. In some instances, immune cells for ACT may be engineered to express payloads of the invention such as IL15 to reduce the need for preconditioning (Pengram et al. (2012) Blood 119 (18): 4133-41; the contents of which are incorporated by reference in their entirety).

[0848] In some embodiments, SREs, biocircuits and compositions of the present invention may be used to minimize preconditioning regimens associated with adoptive cell therapy. As used herein “preconditioning” refers to any therapeutic regimen administered to a subject to improve the outcome of adoptive cell therapy. Preconditioning strategies include, but are not limited to total body irradiation and/or lymphodepleting chemotherapy. Adoptive therapy clinical trials without preconditioning have failed to demonstrate any clinical benefit, indicating its importance in ACT. Yet, preconditioning is associated with significant toxicity and limits the subject cohort that is suitable for ACT. In some instances, immune cells for ACT may be engineered to express cytokines such as IL2 as payload using SREs of the present invention to reduce the need for preconditioning.

[0849] In some embodiments, immune cells for ACT may be dendritic cells, T cells such as CD8⁺ T cells and CD4⁺ T cells, natural killer (NK) cells, NK T cells, Cytotoxic T lymphocytes (CTLs), tumor infiltrating lymphocytes (TILs), lymphokine activated killer (LAK) cells, memory T cells, regulatory T cells (Tregs), helper T cells, cytokine-induced killer (CIK) cells, and any combination thereof. In other embodiments, immune stimulatory cells for ACT may be generated from embryonic stem cell (ESC) and induced pluripotent stem cell (iPSC). In some embodiments, autologous or allogeneic immune cells are used for ACT.

[0850] In some embodiments, cells used for ACT may be T cells engineered to express CARs comprising an antigen-binding domain specific to an antigen on tumor cells of interest. In other embodiments, cells used for ACT may be NK cells engineered to express CARs comprising an antigen-binding domain specific to an antigen on tumor cells of interest. In addition to adoptive transfer of genetically modified T cells (e.g., CAR T cells) for immunotherapy, alternate types of CAR-expressing leukocytes, either alone, or in combination with CAR T cells may be used for adoptive immunotherapy. In one example, a mixture of T cells and NK cells may be used for ACT. The expression level of CARs in T cells and NK cells, according to the present invention, is tuned and controlled by a small molecule that binds to the DD(s) operably linked to the CAR in the effector module.

[0851] In some embodiments, the CARs of the present invention may be placed under the transcriptional control of the T cell receptor alpha constant (TRAC) locus in the T cells to achieve uniform CAR expression while enhancing T cell potency. The TRAC locus may be disrupted using the CRISPR/Cas 9, zinc finger nucleases (ZFNs), TALENs followed by the insertion of the CAR construct. Methods of engineering CAR constructs directed to the TRAC locus are described in Eyquem J. et al (2017) Nature. 543(7643):113-117 (the contents of which are incorporated herein by reference in their entirety).

[0852] In some embodiments, NK cells engineered to express the present compositions may be used for ACT. NK cell activation induces perforin/granzyme-dependent apoptosis in target cells. NK cell activation also induces cytokine secretion such as IFN-7, TNF-α and GM-CSF. These cytokines enhance the phagocytic function of macrophages and their antimicrobial activity, and augment the adaptive immune response via up-regulation of antigen presentation by antigen presenting cells such as dendritic cells (DCs) (Reviewed by Vivier et al., Nat. Immunol., 2008, 9(5): 503-510).

[0853] Other examples of genetic modification may include the introduction of chimeric antigen receptors (CARs) and the down-regulation of inhibitory NK cell receptors such as NKG2A.

[0854] NK cells may also be genetically reprogrammed to circumvent NK cell inhibitory signals upon interaction with tumor cells. For example, using CRISPR, ZFN, or TALEN to genetically modify NK cells to silence their inhibitory receptors may enhance the anti-tumor capacity of NK cells.

[0855] In some embodiments, tumor specific CD8+ T cells may be engineered to express regulatable IL12 to eradicate pre-established tumors and/or as cancer vaccine. Such methods are described by Kerkar S P, et al. (2010). Cancer Research 70(17): 6725-6734 and Kerkar S P et al. (2011) J Clin Invest 121(12): 4746-4757; the contents of each of which are incorporated by reference in their entirety.

[0856] Immune cells can be isolated and expanded ex vivo using a variety of methods known in the art. For example, methods of isolating and expanding cytotoxic T cells are described in U.S. Pat. Nos. 6,805,861 and 6,531,451; US Patent Publication No.: US20160348072A1 and International Patent Publication NO: WO2016168595A1; the contents of each of which are incorporated herein by reference in their entirety. Isolation and expansion of NK cells is described in US Patent Publication NO.: US20150152387A1, U.S. Pat. No. 7,435,596; and Oyer, J. L. (2016). Cytotherapy. 18(5):653-63; the contents of each of which are incorporated by reference herein in its entirety. Specifically, human primary NK cells may be expanded in the presence of feeder cells e.g. a myeloid cell line that has been genetically modified to express membrane bound IL15, IL21, IL12 and 4-1BBL.

[0857] In some instances, sub populations of immune cells may be enriched for ACT. Methods for immune cell enrichment are taught in International Patent Publication No.: WO2015039100A1. In another example, T cells positive for B and T lymphocyte attenuator marker BTLA) may be used to enrich for T cells that are anti-cancer reactive as described in U.S. Pat. No. 9,512,401 (the content of each of the above disclosures are incorporated herein by reference in their entireties).

[0858] In some embodiments, immune cells for ACT may be depleted of select sub populations to enhance T cell expansion. For example, immune cells may be depleted of Foxp3+T lymphocytes to minimize the ant-tumor immune response using methods taught in US Patent Publication NO.: US 20160298081A1; the contents of which are incorporated by reference herein in their entirety.

[0859] In some embodiments, immune cells may be enriched for FOXP3+ cells to enrich for T cells that are critical for immune tolerance to reduce graft versus host disease.

[0860] In some embodiments, activation and expansion of T cells for ACT is achieved antigenic stimulation of a transiently expressed Chimeric Antigen Receptor (CAR) on the cell surface. Such activation methods are taught in International Patent NO.: WO2017015427, the content of which are incorporated herein by reference in their entirety.

[0861] In some embodiments, activation and expansion of T cells for ACT is achieved by a transiently expressed Chimeric Antigen Receptor (CAR) on the cell surface. Such activation methods are taught in International Patent NO. WO2017015427, the content of which are incorporated herein by reference in their entirety.

[0862] In some embodiments, immune cells may be activated by antigens associated with antigen presenting cells (APCs). In some embodiments, the APCs may be dendritic cells, macrophages or B cells that antigen specific or nonspecific. The APCs may autologous or homologous in their organ. In some embodiments, the APCs may be artificial antigen presenting cells (aAPCs) such as cell based aAPCs or acellular aAPCs. Cell based aAPCs are may be selected from either genetically modified allogeneic cells such as human erythroleukemia cells or xenogeneic cells such as murine fibroblasts and Drosophila cells. Alternatively, the APCs maybe be acellular wherein the antigens or costimulatory domains are presented on synthetic surfaces such as latex beads, polystyrene beads, lipid vesicles or exosomes.

[0863] In some embodiments, cells of the invention, specifically T cells may be expanded using artificial cell platforms. In one embodiment, the mature T cells may be generated using artificial thymic organoids (ATOs) described by Seet C S et al. 2017. Nat Methods. 14, 521-530 (the contents of which are incorporated herein by reference in their entirety). ATOs are based on a stromal cell line expressing delta like canonical notch ligand (DLL1). In this method, stromal cells are aggregated with hematopoietic stem and progenitor cells by centrifugation and deployed on a cell culture insert at the air-fluid interface to generate organoid cultures. ATO-derived T cells exhibit naive phenotypes, a diverse T cell receptor (TCR) repertoire and TCR-dependent function.

[0864] In some embodiments, the T cells of the invention may be separated from peripheral blood by a process known as apheresis, which separates lymphocytes from plasma, platelets and RBCs, and granulocytes. Lymphocyte in peripheral blood cells may further be separated from monocytes using a semi-automated elutriation device. T cells may also be enriched by magnetic selection with anti CD3/CD28 beads. In one embodiment, an additional step of using a plastic adherent surface to deplete monocytes from the PBMCs may be utilized. Methods of T cell enrichment are disclosed in Stroncek D F et al. (2017) Journal of Translational Medicine. 15:59; the contents of which are incorporated by reference in its entirety.

[0865] In some embodiments, adoptive cell therapy is carried out by autologous transfer, wherein the cells are derived from a subject in need of a treatment and the cells, following isolation and processing are administered to the same subject. In other instances, ACT may involve allogenic transfer wherein the cells are isolated and/or prepared from a donor subject other than the recipient subject who ultimately receives cell therapy. The donor and recipient subject may be genetically identical, or similar or may express the same HLA class or subtype.

[0866] In some embodiments, the multiple immunotherapeutic agents introduced into the immune cells for ACT (e.g., T cells and NK cells) may be controlled by the same biocircuit system. In one example, a cytokine such as IL12 and a CAR construct such as CD19 CAR are linked to the same hDHFR destabilizing domain. The expression of IL12 and CD19 CAR is tuned using TMP simultaneously. In other embodiments, the multiple immunotherapeutic agents introduced into the immune cells for ACT (e.g., T cells and NK cells) may be controlled by different biocircuit systems. In one example, a cytokine such as IL12 and a CAR construct such as CD19 CAR are linked to different DDs in two separate effector modules, thereby can be tuned separately using different stimuli. In another example, a cytokine such as IL12 and a IL15 or IL15/IL15Ra are linked to different DDs in two separate effector modules, thereby can be tuned separately using different stimuli. In another example, a suicide gene and a CAR construct may be linked to two separate effector modules.

[0867] In some embodiments, the multiple immunotherapeutic agents introduced into the immune cells for ACT (e.g., T cells and NK cells) may be controlled by the same biocircuit system. In one example, a cytokine such as IL15 and a CAR construct such as CD19 CAR are linked to the same hDHFR destabilizing domain. The expression of IL15 and CD19 CAR is tuned using TMP simultaneously. In other embodiments, the multiple immunotherapeutic agents introduced into the immune cells for ACT (e.g., T cells and NK cells) may be controlled by different biocircuit systems. In one example, a cytokine such as IL15 and a CAR construct such as CD19 CAR are linked to different DDs in two separate effector modules, thereby can be tuned separately using different stimuli.

[0868] In some embodiments, the multiple immunotherapeutic agents introduced into the immune cells for ACT (e.g., T cells and NK cells) may be controlled by the same biocircuit system. In one example, a cytokine such as IL2 and a Caspase 9 are linked to the same hDHFR destabilizing domain. The expression of IL2 and Caspase 9 is tuned using TMP simultaneously. In other embodiments, the multiple immunotherapeutic agents introduced into the immune cells for ACT (e.g., T cells and NK cells) may be controlled by different biocircuit systems. In one example, a cytokine such as IL2 and Caspase 9 constructs are linked to different DDs in two separate effector modules, and can be tuned separately using different stimuli. In another example, a suicide gene and a CAR construct may be linked to two separate effector modules.

[0869] Following genetic modulation using SREs, biocircuits and compositions of the invention, cells are administered to the subject in need thereof. Methods for administration of cells for adoptive cell therapy are known and may be used in connection with the provided methods and compositions. For example, adoptive T cell therapy methods are described, e.g., in US Patent Application Publication No. 2003/0170238 to Gruenberg et al; U.S. Pat. No. 4,690,915 to Rosenberg; Rosenberg (2011) Nat Rev Clin Oncol. 8(10):577-85). See, e.g., Themeli et al. (2013) Nat Biotechnol. 31(10): 928-933; Tsukahara et al. (2013) Biochem Biophys Res Commun 438(1): 84-9; Davila et al. (2013) PLoS ONE 8(4): e61338; the contents of each of which are incorporated herein by reference in their entirety.

[0870] In some embodiments, immune cells for ACT may be modified to express one or more immunotherapeutic agents which facilitate immune cells activation, infiltration, expansion, survival and anti-tumor functions.

[0871] In some embodiments, immune cells for ACT may be modified to express one or more immunotherapeutic agents which facilitate immune cells activation, infiltration, expansion, survival and anti-tumor functions. The immunotherapeutic agents may be a second CAR or TCR specific to a different target molecule; a cytokine or a cytokine receptor; a chimeric switch receptor that converts an inhibitory signal to a stimulatory signal; a homing receptor that guides adoptively transferred cells to a target site such as the tumor tissue; an agent that optimizes the metabolism of the immune cell; or a safety switch gene (e.g., a suicide gene) that kills activated T cells when a severe event is observed after adoptive cell transfer or when the transferred immune cells are no-longer needed.

[0872] In some embodiments, immune cells for ACT may also be modified to express one or more immunotherapeutic agents which facilitate immune cells activation, infiltration, expansion, survival and anti-tumor functions. The immunotherapeutic agents may be a CAR or TCR specific to a different target molecule; a cytokine or a cytokine receptor; a chimeric switch receptor that converts an inhibitory signal to a stimulatory signal; a homing receptor that guides adoptively transferred cells to a target site such as the tumor tissue; an agent that optimizes the metabolism of the immune cell; or a safety switch gene (e.g., a suicide gene) that kills activated T cells when a severe event is observed after adoptive cell transfer or when the transferred immune cells are no-longer needed.

[0873] In some embodiments, immune cells used for adoptive cell transfer can be genetically manipulated to improve their persistence, cytotoxicity, tumor targeting capacity, and ability to home to disease sites in vivo, with the overall aim of further improving upon their capacity to kill tumors in cancer patients. One example is to introduce effector modules of the invention comprising cytokines such as gamma-cytokines (IL2 and IL15) into immune cells to promote immune cell proliferation and survival. Transduction of cytokine genes (e.g., gamma-cytokines IL2 and IL15) into cells will be able to propagate immune cells without addition of exogenous cytokines and cytokine expressing NK cells have enhanced tumor cytotoxicity.

[0874] In some embodiments, immune cells used for adoptive cell transfer can be genetically manipulated to improve their persistence, cytotoxicity, tumor targeting capacity, and ability to home to disease sites in vivo, with the overall aim of further improving upon their capacity to kill tumors in cancer patients. One example is to introduce effector modules of the invention comprising cytokines such as gamma-cytokines (IL15) into immune cells to promote immune cell proliferation and survival. Transduction of cytokine genes (e.g., IL15) into cells will be able to propagate immune cells without addition of exogenous cytokines and cytokine expressing NK cells have enhanced tumor cytotoxicity.

[0875] In some embodiments, immune cells used for adoptive cell transfer can be genetically manipulated to improve their persistence, cytotoxicity, tumor targeting capacity, and ability to home to disease sites in vivo, with the overall aim of further improving upon their capacity to kill tumors in cancer patients. One example is to introduce effector modules of the invention comprising cytokines such as gamma-cytokines (IL2) into immune cells to promote immune cell proliferation and survival. Transduction of cytokine genes (e.g., gamma-cytokines IL2) into cells will be able to propagate immune cells without addition of exogenous cytokines and cytokine expressing NK cells have enhanced tumor cytotoxicity.

[0876] NK cells may also be modified to become insensitive to suppressive cytokines such as TGF-β, thereby preserving their cytotoxicity. For example, NK cells can be genetically modified to express the dominant negative mutant form of TGFβ type II receptor (DNTORII) on their surface that render NK cells resistant to the suppressive effects of TGF-β.

[0877] In some embodiments, biocircuits, their components, SREs or effector modules may be utilized to prevent T cell exhaustion. As used herein, “T cell exhaustion” refers to the stepwise and progressive loss of T cell function caused by chronic T cell activation. T cell exhaustion is a major factor limiting the efficacy of antiviral and antitumor immunotherapies. Exhausted T cells have low proliferative and cytokine producing capabilities concurrent with high rates of apoptosis and high surface expression of multiple inhibitory receptors. T cell activation leading to exhaustion may occur either in the presence or absence of the antigen.

[0878] In some embodiments, the biocircuits, and their components may be utilized to prevent T cell exhaustion in the context of Chimeric Antigen Receptor-T cell therapy (CAR-T). In this context, exhaustion in some instances, may be caused by the oligomerization of the scFvs of the CAR on the cell surface which leads to continuous activation of the intracellular domains of the CAR. As a non-limiting example, CARs of the present invention may include scFvs that are unable to oligomerize. As another non-limiting example, CARs that are rapidly internalized and re-expressed following antigen exposure may also be selected to prevent chronic scFv oligomerization on cell surface. In one embodiment, the framework region of the scFvs may be modified to prevent constitutive CAR signaling (Long et al. 2014. Cancer Research. 74(19) 51; the contents of which are incorporated by reference in their entirety). Tunable biocircuit systems of the present invention may also be used to regulate the surface expression of the CAR on the T cell surface to prevent chronic T cell activation. The CARs of the invention may also be engineered to minimize exhaustion. As a non-limiting example, the 41-BB signaling domain may be incorporated into CAR design to ameliorate T cell exhaustion. In some embodiments, any of the strategies disclosed by Long H A et al. may be utilized to prevent exhaustion (Long A H et al. (2015) Nature Medicine 21, 581-590; the contents of which are incorporated herein by reference in their entirety).

[0879] In some embodiments, the tunable nature of the biocircuits of the present invention may be utilized to reverse human T cell exhaustion observed with tonic CAR signaling. Reversibly silencing the biological activity of adoptively transferred cells using compositions of the present invention may be used to reverse tonic signaling which, in turn, may reinvigorate the T cells. Reversal of exhaustion may be measured by the downregulation of multiple inhibitory receptors associated with exhaustion.

[0880] In some embodiments, T cell metabolic pathways may be modified to diminish the susceptibility of T cells to exhaustion. Metabolic pathways may include, but are not limited to glycolysis, urea cycle, citric acid cycle, beta oxidation, fatty acid biosynthesis, pentose phosphate pathway, nucleotide biosynthesis, and glycogen metabolic pathways. As a non-limiting example, payloads that reduce the rate of glycolysis may be utilized to restrict or prevent T cell exhaustion (Long et al. Journal for Immunotherapy of Cancer 2013, 1(Suppl 1): P21; the contents of which are incorporated by reference in their entirety). In one embodiment, T cells of the present invention may be used in combination with inhibitors of glycolysis such as 2-deoxyglucose, and rapamycin.

[0881] In some embodiments, effector modules of the present invention, useful for immunotherapy may be placed under the transcriptional control of the T cell receptor alpha locus constant (TRAC) locus in the T cells. Eyquem et al. have shown that expression of the CAR from the TRAC locus prevents T cell exhaustion and the accelerated differentiation of T cells caused by excessive T cell activation (Eyquem J. et al (2017) Nature. 543(7643):113-117; the contents of which are incorporated herein by reference in their entirety).

[0882] In some embodiments, payloads of the invention may be used in conjunction with antibodies or fragments that target T cell surface markers associated with T cell exhaustion. T-cell surface markers associated with T cell exhaustion that may be used include, but are not limited to, CTLA-1, PD-1, TGIT, LAG-3, 2B4, BTLA, TIM3, VISTA, and CD96.

[0883] In one embodiment, the payload of the invention may be a CD276 CAR (with CD28, 4-IBB, and CD3 zeta intracellular domains), that does not show an upregulation of the markers associated with early T cell exhaustion (see International patent publication No. WO2017044699; the contents of which are incorporated by reference in their entirety).

[0884] T cells that are specific to certain tumor antigens, may be subject to chronic antigen exposure. Persistent antigen expression can lead to immune check-point expression, which in turn, induces a state of exhaustion among cognate antigen specific T cells. Constant expression of the chimeric antigen receptors of the invention may result in chronic interaction with the antigen, which leads to exhaustion. The compositions disclosed herein may be used to prevent T cell exhaustion by modulating surface CAR expression using the stimulus specific to the invention. In one embodiment, the SREs of the present invention may be used to achieve pulsatile expression of the compositions of the invention. As used here, “pulsatile” refers to a plurality of payload expression at spaced apart time intervals. Generally, upon administration of the stimulus, the expression of the payload is increased causing the first pulse; following the withdrawal of the stimulus, the expression of the payload decreases and this represents the interval time between the first exposure and the next exposure to the stimulus, after which the second exposure to the stimulus is initiated.

[0885] Also provided herein, is a method of preventing or reversing T cell exhaustion in a subject in need thereof, where the method comprising administering to the subject a therapeutically effective amount of a composition comprising at least one effector module. In some embodiments, the effector module includes a stimulus response element (SRE) operably linked to at least one immunotherapeutic agent, such that the SRE responds to a stimulus and tunes the expression and/or function of the immunotherapeutic agent, thereby preventing or reversing T cell exhaustion. In some embodiments, the immunotherapeutic agent may be a chimeric antigen receptor. Examples of chimeric antigen receptors include, but are not limited to GD2 CAR, BCMA CAR, CD33 CAR, Her2 CAR, ALK CAR, CD22 CAR, or a CD276 CAR. In some embodiments, the CAR may be a bispecific CAR comprising an extracellular domain which recognizes at least one antigen such as GD2, BCMA, CD33, Her2, ALK, CD22 or a CD276. In some embodiments, the methods described herein may include pulsatile expression of the compositions of the invention to prevent T cell exhaustion. In some instances, T cell exhaustion may be reversed by the addition of the stimulus. In other instances, T cell exhaustion may be reversed by the withdrawal of the stimulus.

[0886] In some embodiments, the compositions of the present invention may be utilized to alter TIL (tumor infiltrating lymphocyte) populations in a subject. In one embodiment, any of the payloads described herein may be utilized to change the ratio of CD4 positive cells to CD8 positive populations. In some embodiments, TILs may be sorted ex vivo and engineered to express any of the cytokines described herein. Payloads of the invention may be used to expand CD4 and/or CD8 populations of TILs to enhance TIL mediated immune response.

### 2. Cancer Vaccines

[0887] In some embodiments, biocircuits, effector modules, payloads of interest (immunotherapeutic agents), vectors, cells and compositions of the present invention may be used in conjunction with cancer vaccines.

[0888] In some embodiments, biocircuits, effector modules, payloads of interest (immunotherapeutic agents), vectors, cells and compositions of the present invention may be used in conjunction with cancer vaccines. In one aspect, dendritic cells are modified to express the compositions of the invention and used as cancer vaccines.

[0889] In some embodiments, cancer vaccine may comprise peptides and/or proteins derived from tumor associated antigen (TAA). Such strategies may be utilized to evoke an immune response in a subject, which in some instances may be a cytotoxic T lymphocyte (CTL) response. Peptides used for cancer vaccines may also be modified to match the mutation profile of a subject. For example, EGFR derived peptides with mutations matched to the mutations found in the subject in need of therapy have been successfully used in patients with lung cancer (Li F et al. (2016) Oncoimmunology. October 7; 5(12): e1238539; the contents of which are incorporated herein by reference in their entirety).

[0890] In one embodiment, cancer vaccines of the present invention may superagonist altered peptide ligands (APL) derived from TAAs. These are mutant peptide ligands deviate from the native peptide sequence by one or more amino acids, which activate specific CTL clones more effectively than native epitopes. These alterations may allow the peptide to bind better to the restricting Class I MHC molecule or interact more favorably with the TCR of a given tumor-specific CTL subset. APLs may be selected using methods taught in US Patent Publication NO.: US20160317633A1, the contents of which are incorporated herein by reference in their entirety.

[0891] Relapse of hematologic malignancies is the primary cause of treatment failure after allogeneic hematopoietic stem cell transplantation (HCT). The Wilm's tumor (WT1) gene product is a tumor associated antigen that is expressed in acute leukemia and other hematological malignancies, with limited expression in normal tissues. The compositions of the present invention may be co-administered with donor derived WT1 peptide loaded dendritic cell vaccine to prevent relapse of disease following immunotherapy (Shah N N et al. (2016) Biol Blood Marrow Transplant. 22(12):2149-215; the contents of which are incorporated herein by reference in their entirety.

### 3. Combination Treatments

[0892] In some embodiments, it is desirable to combine compositions, vectors and cells of the invention for administration to a subject. Compositions of the invention comprising different immunotherapeutic agents may be used in combination for enhancement of immunotherapy. Compositions of the invention comprising different immunotherapeutic agents may be used in combination or in conjunction with known immunotherapeutic agents for enhancement of immunotherapy.

[0893] In some embodiments, it is desirable to combine compositions of the invention with adjuvants, that can enhance the potency and longevity of antigen-specific immune responses. Adjuvants used as immunostimulants in combination therapy include biological molecules or delivery carriers that deliver antigens. As non-limiting examples, the compositions of the invention may be combined with biological adjuvants such as cytokines, Toll Like Receptors, bacterial toxins, and/or saponins. In other embodiments, the compositions of the present invention may be combined with delivery carriers. Exemplary delivery carriers include, polymer microspheres, immune stimulating complexes, emulsions (oil-in-water or water-in-oil), aluminum salts, liposomes or virosomes.

[0894] In some embodiments, immune effector cells modified to express biocircuits, effector modules, DDs and payloads of the invention may be combined with the biological adjuvants described herein. Dual regulation of CAR and cytokines and ligands to segregate the kinetic control of target-mediated activation from intrinsic cell T cell expansion. Such dual regulation also minimizes the need for pre-conditioning regimens in patients. As a non-limiting example, DD regulated CAR e.g. CD19 CAR may be combined with cytokines e.g. IL12 to enhance the anti-tumor efficacy of the CAR (Pegram H. J., et al. Tumor-targeted T cells modified to secrete IL12 eradicate systemic tumors without need for prior conditioning. Blood. 2012; 119:4133-41; the contents of each of which are incorporated herein by reference in their entirety). As another non-limiting example, Merchant et al. combined dendritic cell-based vaccinations with recombinant human IL7 to improve outcome in high-risk pediatric sarcomas patients (Merchant, M. S et. al. Adjuvant immunotherapy to Improve Outcome in High-Risk Pediatric Sarcomas. Clin Cancer Res. 2016. 22(13):3182-91; the contents of each of which are incorporated herein by reference in their entirety).

[0895] In some embodiments, immune effector cells modified to express biocircuits, effector modules, DDs and payloads of the invention may be combined with the biological adjuvants described herein. Dual regulation of CAR and cytokines and ligands to segregate the kinetic control of target-mediated activation from intrinsic cell T cell expansion. Such dual regulation also minimizes the need for pre-conditioning regimens in patients. As a non-limiting example, CAR e.g. CD19 CAR may be combined with DD regulated cytokines e.g. IL12 to enhance the anti-tumor efficacy of the CAR (Pegram H. J., et al. Tumor-targeted T cells modified to secrete IL12 eradicate systemic tumors without need for prior conditioning. Blood. 2012; 119:4133-41; the contents of each of which are incorporated herein by reference in their entirety).

[0896] In some embodiments, immune effector cells modified to express biocircuits, effector modules, DDs and payloads of the invention may be combined with the biological adjuvants described herein. Dual regulation of Chimeric Antigen Receptor (CAR) and cytokines and ligands may be used to segregate the kinetic control of target-mediated activation from intrinsic cell T cell expansion. Such dual regulation also minimizes the need for pre-conditioning regimens in patients. As a non-limiting example, DD regulated CAR e.g. CD19 CAR may be combined with cytokines e.g. IL15 to enhance the anti-tumor efficacy of the CAR.

[0897] In some embodiments, immune effector cells modified to express one or more antigen-specific TCRs or CARs may be combined with compositions of the invention comprising immunotherapeutic agents that convert the immunosuppressive tumor microenvironment.

[0898] In one aspect, effector immune cells modified to express CARs specific to different target molecules on the same cell may be combined. In another aspect, different immune cells modified to express the same CAR construct such as NK cells and T cells may be used in combination for a tumor treatment, for instance, a T cell modified to express a CD19 CAR may be combined with a NK cell modified to express the same CD19 CAR to treat B cell malignancy.

[0899] In one aspect, effector immune cells modified to express payloads of the invention may be combined with CARs specific to different target molecules on the same cell. In another aspect, different immune cells modified to express the CAR construct such as NK cells and T cells may be used in combination with immune cells expressing the payloads of the invention for a tumor treatment. For instance, a T cell modified to express a CD19 CAR may be combined with a NK cell modified to express the same CD19 CAR to treat B cell malignancy to be used in conjunction with T cells expressing IL15 or IL15-IL15Ra fusion proteins.

[0900] In one aspect, effector immune cells modified to express payloads of the invention may be combined with CARs specific to different target molecules on the same cell may be combined. In another aspect, different immune cells modified to express the CAR construct such as NK cells and T cells may be used in combination with immune cells of the invention for a tumor treatment, for instance, a T cell modified to express a CD19 CAR may be combined with a NK cell modified to express the same DD-1L12 to treat B cell malignancy. In other embodiments, immune cells modified to express compositions of the invention may be combined with checkpoint blockade agents.

[0901] In other embodiments, immune cells modified to express CARs may be combined with checkpoint blockade agents.

[0902] In other embodiments, immune cells modified to express payloads of the invention may be combined with checkpoint blockade agents.

[0903] In some embodiments, immune effector cells modified to expressed biocircuits, effector modules, DDs and payloads of the invention may be combined with cancer vaccines of the invention.

[0904] In some embodiments, immune effector cells modified to expressed biocircuits, effector modules, DDs and payloads of the invention may be combined with cancer vaccines.

[0905] In some embodiments, an effector module comprising a cytokine may be used in combination with an effector module encoding a safety switch or a regulatory switch.

[0906] In some embodiments, an effector module comprising a cytokines may be used in combination with an effector module comprising a different cytokine, or an effector module comprising a safety switch, or an effector module comprising a metabolic factor, or an effector module comprising a homing receptor.

[0907] In some embodiments, effector modules of the invention may be used in combination with a cytokine other than IL15 and IL15-IL15Ra fusion proteins, such as a Chimeric antigen receptor, or a safety switch, or a metabolic factor, or an effector module comprising a homing receptor.

[0908] In some embodiments, methods of the invention may include combination of the compositions of the invention with other agents effective in the treatment of cancers, infection diseases and other immunodeficient disorders, such as anti-cancer agents. As used herein, the term “anti-cancer agent” refers to any agent which is capable of negatively affecting cancer in a subject, for example, by killing cancer cells, inducing apoptosis in cancer cells, reducing the growth rate of cancer cells, reducing the incidence or number of metastases, reducing tumor size, inhibiting tumor growth, reducing the blood supply to a tumor or cancer cells, promoting an immune response against cancer cells or a tumor, preventing or inhibiting the progression of cancer, or increasing the lifespan of a subject with cancer.

[0909] In some embodiments, anti-cancer agent or therapy may be a chemotherapeutic agent, or radiotherapy, immunotherapeutic agent, surgery, or any other therapeutic agent which, in combination with the present invention, improves the therapeutic efficacy of treatment.

[0910] In one embodiment, an effector module comprising a CD19 CAR may be used in combination with amino pyrimidine derivatives such as the Burkit's tyrosine receptor kinase (BTK) inhibitor using methods taught in International Patent Application NO.: WO2016164580, the contents of which are incorporated herein by reference in their entirety.

[0911] In one embodiment, an effector module comprising a IL15 or IL15-IL15Ra fusion proteins may be used in combination with amino pyrimidine derivatives such as the Burkit's tyrosine receptor kinase (BTK) inhibitor using methods taught in International Patent Application NO. WO2016164580, the contents of which are incorporated herein by reference in their entirety.

[0912] In one embodiment, an effector module comprising a IL12 may be used in combination with amino pyrimidine derivatives such as the Burkit's tyrosine receptor kinase (BTK) inhibitor using methods taught in International Patent Application NO. WO2016164580, the contents of which are incorporated herein by reference in their entirety.

[0913] In some embodiments, compositions of the present invention may be used in combination with immunotherapeutics other than the inventive therapy described herein, such as antibodies specific to some target molecules on the surface of a tumor cell.

[0914] Exemplary chemotherapies include, without limitation, Acivicin; Aclarubicin; Acodazole hydrochloride; Acronine; Adozelesin; Aldesleukin; Altretamine; Ambomycin; Ametantrone acetate; Amsacrine; Anastrozole; Anthramycin; Asparaginase; Asperrin, Sulindac, Curcumin, alkylating agents including: Nitrogen mustards such as mechlor-ethamine, cyclophosphamide, ifosfamide, melphalan and chlorambucil; nitrosoureas such as carmustine (BC U), lomustine (CCNU), and semustine (methyl-CC U); thylenimines/methylmelamine such as thriethylenemelamine (TEM), triethylene, thiophosphoramide (thiotepa), hexamethylmelamine (HMM, altretamine); alkyl sulfonates such as busulfan; triazines such as dacarbazine (DTIC); antimetabolites including folic acid analogs such as methotrexate and trimetrexate, pyrrolidine analogs such as 5-fluorouracil, fluorodeoxyuridine, gemcitabine, cytosine arabinoside (AraC, cytarabine), 5-azacytidine, 2,2′-difluorodeoxycytidine, purine analogs such as 6-mercaptopurine, 6-thioguanine, azathioprine, 2′-deoxycoformycin (pentostatin), erythrohydroxynonyladenine (EHNA), fludarabine phosphate, and 2-chlorodeoxyadenosine (cladribine, 2-CdA); natural products including antimitotic drugs such as paclitaxel, vinca alkaloids including vinblastine (VLB), vincristine, and vinorelbine, taxotere, estramustine, and estramustine phosphate; epipodophylotoxins such as etoposide and teniposide; antibiotics, such as actimomycin D, daunomycin (rubidomycin), doxorubicin, mitoxantrone, idarubicin, bleomycins, plicamycin (mithramycin), mitomycinC, and actinomycin; enzymes such as L-asparaginase, cytokines such as interferon (IFN)-gamma, tumor necrosis factor (TNF)-alpha, TNF-beta and GM-CSF, anti-angiogenic factors, such as angiostatin and endostatin, inhibitors of FGF or VEGF such as soluble forms of receptors for angiogenic factors, including soluble VGF/VEGF receptors, platinum coordination complexes such as cisplatin and carboplatin, anthracenediones such as mitoxantrone, substituted urea such as hydroxyurea, methylhydrazine derivatives including N-methylhydrazine (MIFf) and procarbazine, adrenocortical suppressants such as mitotane (o,ρ′-DDD) and aminoglutethimide; hormones and antagonists including adrenocorticosteroid antagonists such as prednisone and equivalents, dexamethasone and aminoglutethimide; progestin such as hydroxyprogesterone caproate, medroxyprogesterone acetate and megestrol acetate; estrogen such as diethylstilbestrol and ethinyl estradiol equivalents; antiestrogen such as tamoxifen; androgens including testosterone propionate and fluoxymesterone/equivalents; antiandrogens such as flutamide, gonadotropin-releasing hormone analogs and leuprolide; non-steroidal antiandrogens such as flutamide; kinase inhibitors, histone deacetylase inhibitors, methylation inhibitors, proteasome inhibitors, monoclonal antibodies, oxidants, anti-oxidants, telomerase inhibitors, BH3 mimetics, ubiquitin ligase inhibitors, stat inhibitors and receptor tyrosin kinase inhibitors such as imatinib mesylate (marketed as Gleevac or Glivac) and erlotinib (an EGF receptor inhibitor) now marketed as Tarveca; anti-virals such as oseltamivir phosphate, Amphotericin B, and palivizumab; Sdi 1 mimetics; Semustine; Senescence derived inhibitor 1; Sparfosic acid; Spicamycin D; Spiromustine; Splenopentin; Spongistatin 1; Squalamine; Stipiamide; Stromelysin inhibitors; Sulfinosine; Superactive vasoactive intestinal peptide antagonist; Velaresol; Veramine; Verdins; Verteporfin; Vinorelbine; Vinxaltine; Vitaxin; Vorozole; Zanoterone; Zeniplatin; Zilascorb; and Zinostatin stimalamer; PI3KO small-molecule inhibitor, GSK2636771; pan-PI3K inhibitor (BKM120); BRAF inhibitors. Vemurafenib (Zelboraf) and dabrafenib (Tafinlar); or any analog or derivative and variant of the foregoing.

[0915] Radiotherapeutic agents and factors include radiation and waves that induce DNA damage for example, γ-irradiation, X-rays, UV-irradiation, microwaves, electronic emissions, radioisotopes, and the like. Therapy may be achieved by irradiating the localized tumor site with the above described forms of radiations. It is most likely that all of these factors effect a broad range of damage DNA, on the precursors of DNA, the replication and repair of DNA, and the assembly and maintenance of chromosomes. Dosage ranges for X-rays range from daily doses of 50 to 200 roentgens for prolonged periods of time (3 to 4 weeks), to single doses of 2000 to 6000 roentgens. Dosage ranges for radioisotopes vary widely, and depend on the half-life of the isotope, the strength and type of radiation emitted, and the uptake by the neoplastic cells.

[0916] In some embodiments, the chemotherapeutic agent may be an immunomodulatory agent such as lenalidomide (LEN). Recent studies have demonstrated that lenalidomide can enhance antitumor functions of CAR modified T cells (Otahal et al., Oncoimmunology, 2015, 5(4): e1115940). Some examples of anti-tumor antibodies include tocilizumab, siltuximab.

[0917] Other agents may be used in combination with compositions of the invention may also include, but not limited to, agents that affect the upregulation of cell surface receptors and their ligands such as Fas/Fas ligand, DR4 or DR5/TRAIL and GAP junctions, cytostatic and differentiation agents, inhibitors of cell adhesion such as focal adhesion kinase (FAKs) inhibitors and Lovastatin, or agents that increase the sensitivity of the hyper proliferative cells to apoptotic inducers such as the antibody C225.

[0918] The combinations may include administering the compositions of the invention and other agents at the same time or separately. Alternatively, the present immunotherapy may precede or follow the other agent/therapy by intervals ranging from minutes, days, weeks to months.

[0919] In some embodiments, CAR-T cells of the invention may be co-administered with retinoids to eradicate myeloid derived suppressor cells. Myeloid-derived suppressor cells (MDSCs) are a heterogeneous population of early myeloid progenitors, immature granulocytes, macrophages, and dendritic cells at different stages of differentiation. MDSCs have the capacity to suppress both the cytotoxic activities of natural killer (NK) and NKT cells, and the adaptive immune response mediated by CD4+ and CD8+ T cells. Long A H et al. (2016) Cancer Immunol Res.; 4(10):869-880 have described the co-treatment of CARs with all trans retinoic acid (ATRA) for the successful treatment of solid tumors (the contents of which are incorporated by reference in its entirety).

[0920] Adjuvant therapy as used herein refers to the treatment that is given in addition to primary therapy to kill any cancer cells, even if the cancer is undetectable by standard laboratory tests. Experimental data have demonstrated that the lymphocyte depletion induced by cytotoxic regimens for the treatment of cancer could contribute to relapse. Relapse to cancer immunotherapy may be minimized by adjuvant immunotherapy. In some embodiments, adjuvant therapy may include the co-administration of recombinant human Interleukin2 in conjunction with dendritic cells pulsed with peptides derived from tumor cells. In some embodiments, dendritic cells pulsed with autologous tumor cell lysate and keyhole limpet hemocyanin (KLH). Immune cells may be further depleted of CD25 positive T cells. Interleukin 7 may also be co-administered as immunotherapy. In some embodiments, the risk of reinfusing donor-derived tumor cells may be purged with monoclonal antibody 8H9, which interacts with tumor cell surface antigens. Any of the adjuvant therapy methods taught in Merchant et al. (2016), Clin Cancer Res. 1; 22(13):3182-91 may be utilized (the contents of which are incorporated by reference in their entirety).

[0921] In some embodiments, compositions of the invention can be combined with CXCR2 inhibitors or anti-CXCR2 antibodies. Highfill S L et al. (2014) found that CXCR2 positive MDSC cells limit the efficacy of immunotherapy by mediating local immunosuppression (Highfill S L, et al. Sci Transl Med. 2014 May 21; 6(237):237ra67; the contents of which are incorporated herein by reference in its entirety).

### 4. Diseases

[0922] Provided in the present invention is a method of reducing a tumor volume or burden in a subject in need, the method comprising introducing into the subject a composition of the invention.

[0923] The present invention also provides methods for treating a cancer in a subject, comprising administering to the subject an effective amount of an immune effector cell genetically modified to express at least one effector module of the invention.

### Cancer

[0924] Various cancers may be treated with pharmaceutical compositions, biocircuits, biocircuit components, effector modules including their SREs or payloads of the present invention. As used herein, the term “cancer” refers to any of various malignant neoplasms characterized by the proliferation of anaplastic cells that tend to invade surrounding tissue and metastasize to new body sites and also refers to the pathological condition characterized by such malignant neoplastic growths. Cancers may be tumors or hematological malignancies, and include but are not limited to, all types of lymphomas/leukemias, carcinomas and sarcomas, such as those cancers or tumors found in the anus, bladder, bile duct, bone, brain, breast, cervix, colon/rectum, endometrium, esophagus, eye, gallbladder, head and neck, liver, kidney, larynx, lung, mediastinum (chest), mouth, ovaries, pancreas, penis, prostate, skin, small intestine, stomach, spinal marrow, tailbone, testicles, thyroid and uterus.

[0925] Types of carcinomas which may be treated with the compositions of the present invention include, but are not limited to, papilloma/carcinoma, choriocarcinoma, endodermal sinus tumor, teratoma, adenoma/adenocarcinoma, melanoma, fibroma, lipoma, leiomyoma, rhabdomyoma, mesothelioma, angioma, osteoma, chondroma, glioma, lymphoma/leukemia, squamous cell carcinoma, small cell carcinoma, large cell undifferentiated carcinomas, basal cell carcinoma and sinonasal undifferentiated carcinoma.

[0926] Types of carcinomas which may be treated with the compositions of the present invention include, but are not limited to, soft tissue sarcoma such as alveolar soft part sarcoma, angiosarcoma, dermatofibrosarcoma, desmoid tumor, desmoplastic small round cell tumor, extraskeletal chondrosarcoma, extraskeletal osteosarcoma, fibrosarcoma, hemangiopericytoma, hemangiosarcoma, Kaposi's sarcoma, leiomyosarcoma, liposarcoma, lymphangiosarcoma, lymphosarcoma, malignant fibrous histiocytoma, neurofibrosarcoma, rhabdomyosarcoma, synovial sarcoma, and Askin's tumor, Ewing's sarcoma (primitive neuroectodermal tumor), malignant hemangioendothelioma, malignant schwannoma, osteosarcoma, and chondrosarcoma.

[0927] As a non-limiting example, the carcinoma which may be treated may be Acute granulocytic leukemia, Acute lymphocytic leukemia, Acute myelogenous leukemia, Adenocarcinoma, Adenosarcoma, Adrenal cancer, Adrenocortical carcinoma, Anal cancer, Anaplastic astrocytoma, Angiosarcoma, Appendix cancer, Astrocytoma, Basal cell carcinoma, B-Cell lymphoma), Bile duct cancer, Bladder cancer, Bone cancer, Bowel cancer, Brain cancer, Brain stem glioma, Brain tumor, Breast cancer, Carcinoid tumors, Cervical cancer, Cholangiocarcinoma, Chondrosarcoma, Chronic lymphocytic leukemia, Chronic myelogenous leukemia, Colon cancer, Colorectal cancer, Craniopharyngioma, Cutaneous lymphoma, Cutaneous melanoma, Diffuse astrocytoma, Ductal carcinoma in situ, Endometrial cancer, Ependymoma, Epithelioid sarcoma, Esophageal cancer, Ewing sarcoma, Extrahepatic bile duct cancer, Eye cancer, Fallopian tube cancer, Fibrosarcoma, Gallbladder cancer, Gastric cancer, Gastrointestinal cancer, Gastrointestinal carcinoid cancer, Gastrointestinal stromal tumors, General, Germ cell tumor, Glioblastoma multiforme, Glioma, Hairy cell leukemia, Head and neck cancer, Hemangioendothelioma, Hodgkin lymphoma, Hodgkin's disease, Hodgkin's lymphoma, Hypopharyngeal cancer, Infiltrating ductal carcinoma, Infiltrating lobular carcinoma, Inflammatory breast cancer, Intestinal Cancer, Intrahepatic bile duct cancer, Invasive/infiltrating breast cancer, Islet cell cancer, Jaw cancer, Kaposi sarcoma, Kidney cancer, Laryngeal cancer, Leiomyosarcoma, Leptomeningeal metastases, Leukemia, Lip cancer, Liposarcoma, Liver cancer, Lobular carcinoma in situ, Low-grade astrocytoma, Lung cancer, Lymph node cancer, Lymphoma, Male breast cancer, Medullary carcinoma, Medulloblastoma, Melanoma, Meningioma, Merkel cell carcinoma, Mesenchymal chondrosarcoma, Mesenchymous, Mesothelioma, Metastatic breast cancer, Metastatic melanoma, Metastatic squamous neck cancer, Mixed gliomas, Mouth cancer, Mucinous carcinoma, Mucosal melanoma, Multiple myeloma, Nasal cavity cancer, Nasopharyngeal cancer, Neck cancer, Neuroblastoma, Neuroendocrine tumors, Non-Hodgkin lymphoma, Non-Hodgkin's lymphoma, Non-small cell lung cancer, Oat cell cancer, Ocular cancer, Ocular melanoma, Oligodendroglioma, Oral cancer, Oral cavity cancer, Oropharyngeal cancer, Osteogenic sarcoma, Osteosarcoma, Ovarian cancer, Ovarian epithelial cancer, Ovarian germ cell tumor, Ovarian primary peritoneal carcinoma, Ovarian sex cord stromal tumor, Paget's disease, Pancreatic cancer, Papillary carcinoma, Paranasal sinus cancer, Parathyroid cancer, Pelvic cancer, Penile cancer, Peripheral nerve cancer, Peritoneal cancer, Pharyngeal cancer, Pheochromocytoma, Pilocytic astrocytoma, Pineal region tumor, Pineoblastoma, Pituitary gland cancer, Primary central nervous system lymphoma, Prostate cancer, Rectal cancer, Renal cell cancer, Renal pelvis cancer, Rhabdomyosarcoma, Salivary gland cancer, Sarcoma, Sarcoma, bone, Sarcoma, soft tissue, Sarcoma, uterine, Sinus cancer, Skin cancer, Small cell lung cancer, Small intestine cancer, Soft tissue sarcoma, Spinal cancer, Spinal column cancer, Spinal cord cancer, Spinal tumor, Squamous cell carcinoma, Stomach cancer, Synovial sarcoma, T-cell lymphoma), Testicular cancer, Throat cancer, Thymoma/thymic carcinoma, Thyroid cancer, Tongue cancer, Tonsil cancer, Transitional cell cancer, Transitional cell cancer, Transitional cell cancer, Triple-negative breast cancer, Tubal cancer, Tubular carcinoma, Ureteral cancer, Ureteral cancer, Urethral cancer, Uterine adenocarcinoma, Uterine cancer, Uterine sarcoma, Vaginal cancer, and Vulvar cancer.

[0928] In some embodiments, the CARs of the present invention may be a CAR useful in the treatment of multiple myeloma such as a CS1 CAR, a CD38 CAR, a CD138 CAR, and a BCMA CAR. In some embodiments, the CARs of the present invention may be a CAR useful in the treatment of acute myeloid leukemia such as a CD33 CAR, a CD123 CAR, and a CLL1 CAR. In some embodiments, the CARs of the present invention may be a CAR useful in the treatment of T cell leukemia such as a CD5 CAR, and a CD7 CAR. In some embodiments, the CARs of the present invention may be a CAR useful in the treatment of solid tumors such a mesothelin CAR, a GD2 CAR, a GPC3 CAR, a Her2 CAR, an EGFR CAR, a Muc CAR, an EpCAM CAR, a PD-L1 CAR, a CEA CAR, a Muc16 CAR, a CD133 CAR, a CD171 CAR, a CD70 CAR, a CLD18 CAR, a cMET CAR, a EphA2 CAR, a FAP CAR, a Folate Receptor CAR, an IL13Ra2 CAR, an MG7 CAR, a PSMA CAR, a ROR1 CAR, and a VEGFR2 CAR.

### Infectious Diseases

[0929] In some embodiment, biocircuits of the invention may be used for the treatment of infectious diseases. Biocircuits of the invention may be introduced in cells suitable for adoptive cell transfer such as macrophages, dendritic cells, natural killer cells, and or T cells. Infectious diseases treated by the biocircuits of the invention may be diseases caused by viruses, bacteria, fungi, and/or parasites. IL15-IL15Ra payloads of the invention may be used to increase immune cell proliferation and/or persistence of the immune cells useful in treating infectious diseases.

[0930] “Infection diseases” herein refer to diseases caused by any pathogen or agent that infects mammalian cells, preferably human cells and causes a disease condition. Examples thereof include bacteria, yeast, fungi, protozoans, mycoplasma, viruses, prions, and parasites. Examples include those involved in (a) viral diseases such as, for example, diseases resulting from infection by an adenovirus, a herpesvirus (e.g., HSV-I, HSV-II, CMV, or VZV), a poxvirus (e-g-, an orthopoxvirus such as variola or vaccinia, or molluscum contagiosum), a picornavirus (e.g., rhinovirus or enterovirus), an orthomyxovirus (e.g., influenzavirus), a paramyxovirus (e.g., parainfluenza virus, mumps virus, measles virus, and respiratory syncytial virus (RSV)), a coronavirus (e.g., SARS), a papovavirus (e.g., papillomaviruses, such as those that cause genital warts, common warts, or plantar warts), a hepadnavirus (e.g., hepatitis B virus), a flavivirus (e.g., hepatitis C virus or Dengue virus), or a retrovirus (e.g., a lentivirus such as HIV); (b) bacterial diseases such as, for example, diseases resulting from infection by bacteria of, for example, the genus Escherichia, Enterobacter, Salmonella, Staphylococcus, Shigella, Listeria, Aerobacter, Helicobacter, Klebsiella, Proteus, Pseudomonas, Streptococcus, Chlamydia, Mycoplasma, Pneumococcus, Neisseria, Clostridium, Bacillus, Corynebacterium, Mycobacterium, Campylobacter, Vibrio, Serratia, Providencia, Chromobacterium, Brucella, Yersinia, Haemophilus, or Bordetella; (c) other infectious diseases, such chlamydia, fungal diseases including but not limited to candidiasis, aspergillosis, histoplasmosis, cryptococcal meningitis, parasitic diseases including but not limited to malaria, Pneumocystis carnii pneumonia, leishmaniasis, cryptosporidiosis, toxoplasmosis, and trypanosome infection and prions that cause human disease such as Creutzfeldt-Jakob Disease (CJD), variant Creutzfeldt-Jakob Disease (vCJD), Gerstmann-Straüssler-Scheinker syndrome, Fatal Familial Insomnia and kuru.

### 5. Microbiome

[0931] Alterations in the composition of the microbiome may impact the action of anti-cancer therapies. A diverse community of symbiotic, commensal and pathogenic microorganisms exist in all environmentally exposed sites in the body and is herein referred to as the “Microbiome.” Environmentally exposed sites of the body that may be inhabited by a microbiome include the skin, nasopharynx, the oral cavity, respiratory tract, gastrointestinal tract, and the reproductive tract.

[0932] In some embodiments, microbiome native or engineered with immunotherapeutic agents may be used to improve the efficacy of the anti-cancer immunotherapies. Methods of using microbiome to improve responsive to immunotherapeutic agents have been described by Sivan et al (Sivan A., et al. Commensal Bifidobacterium promotes antitumor immunity and facilitates anti-PD-L1 efficacy. Science 2015; 350:1084-9; the contents of which are incorporated herein by reference in their entirety). In one embodiment, protein, RNA and/or other biomolecules derived from the microbiome may be used as a payload to influence the efficacy of the anti-cancer immunotherapies.

[0933] In some embodiments, microbiome native or engineered with immunotherapeutic agents may be used to improve the efficacy of the anti-cancer immunotherapies. Methods of using microbiome to improve responsive to immunotherapeutic agents have been described by Sivan et al. (Sivan A., et al. 2015. Science; 350:1084-9; the contents of which are incorporated herein by reference in their entirety). In other embodiments, the microorganisms may be delivered along with immunotherapeutic compositions of the present invention to improve the efficacy of immunotherapy.

### 6. Tools and Agents for Making Therapeutics

[0934] Provided in the present invention are tools and agents that may be used in generating immunotherapeutics for reducing a tumor volume or burden in a subject in need. A considerable number of variables are involved in producing a therapeutic agent, such as structure of the payload, type of cells, method of gene transfers, method and time of ex vivo expansion, pre-conditioning and the amount and type of tumor burden in the subject. Such parameters may be optimized using tools and agents described herein.

[0935] Provided in the present invention are tools and agents that may be used in generating immunotherapeutics for reducing a tumor volume/burden or enhancing immune cell persistence in a subject in need. A considerable number of variables are involved in producing a therapeutic agent, such as structure of the payload, type of cells, method of gene transfers, method and time of ex vivo expansion, pre-conditioning and the amount and type of tumor burden in the subject. Such parameters may be optimized using tools and agents described herein.

### Cell Lines

[0936] The present disclosure provides a mammalian cell that has been genetically modified with the compositions of the invention. Suitable mammalian cells include primary cells and immortalized cell lines. Suitable mammalian cell lines include, but are not limited to Human embryonic kidney cell line 293, fibroblast cell line NIH 3T3, human colorectal carcinoma cell line HCT116, ovarian carcinoma cell line SKOV-3, immortalized T cell lines (e.g. Jurkat cells and SupT1 cells), lymphoma cell line Raji cells, NALM-6 cells, K562 cells, HeLa cells, PC12 cells, HL-60 cells, NK cell lines (e.g. NKL, NK92, NK962, and YTS), and the like. In some instances, the cell is not an immortalized cell line, but instead a cell obtained from an individual and is herein referred to as a primary cell. For example, the cell is a T lymphocyte obtained from an individual. Other examples include, but are not limited to cytotoxic cells, stem cells, peripheral blood mononuclear cells or progenitor cells obtained from an individual.

[0937] The present disclosure provides a mammalian cell that has been genetically modified with the compositions of the invention. Suitable mammalian cells include primary cells and immortalized cell lines. Suitable mammalian cell lines include, but are not limited to Human embryonic kidney cell line 293, fibroblast cell line NIH 3T3, human colorectal carcinoma cell line HCT116, ovarian carcinoma cell line SKOV-3, immortalized T cell lines Jurkat cells and SupT1 cells, lymphoma cell line Raji cells, NALM-6 cells, K562 cells, HeLa cells, PC12 cells, HL-60 cells, NK cell lines (e.g., NKL, NK92, NK962, and YTS), REH, SEM, KOPN8, Daudi, Raji, and the like. In some instances, the cell is not an immortalized cell line, but instead a cell obtained from an individual and is herein referred to as a primary cell. For example, the cell is a T lymphocyte obtained from an individual. Other examples include, but are not limited to cytotoxic cells, stem cells, peripheral blood mononuclear cells or progenitor cells obtained from an individual.

### Tracking SREs, Biocircuits and Cell Lines

[0938] In some embodiments, it may be desirable to track the compositions of the invention or the cells modified by the compositions of the invention. Tracking may be achieved by using reporter moieties, which, as used herein, refers to any protein capable of creating a detectable signal, in response to an input. Examples include alkaline phosphatase, β-galactosidase, chloramphenicol acetyltransferase, β-glucuronidase, peroxidase, β-lactamase, catalytic antibodies, bioluminescent proteins e.g. luciferase, and fluorescent proteins such as Green fluorescent protein (GFP).

[0939] In some embodiments, it may be desirable to track the compositions of the invention or the cells modified by the compositions of the invention. Tracking may be achieved by using payloads such as reporter moieties, which, as used herein, refers to any protein capable of creating a detectable signal, in response to an input. Examples include alkaline phosphatase, β-galactosidase, chloramphenicol acetyltransferase, β-glucuronidase, peroxidase, β-lactamase, catalytic antibodies, bioluminescent proteins e.g. luciferase, and fluorescent proteins such as Green fluorescent protein (GFP).

[0940] Reporter moieties may be used to monitor the response of the DD upon addition of the ligand corresponding to the DD. In other instances, reporter moieties may be used to track cell survival, persistence, cell growth, and/or localization in vitro, in vivo, or ex vivo.

[0941] In some embodiments, the preferred reporter moiety may be luciferase proteins. In one embodiment, the reporter moiety is the Renilla luciferase (SEQ ID NO. 6373, encoded by nucleic acid sequence of SEQ ID NO. 6374), or a firefly luciferase (SEQ ID NO. 6375, encoded by nucleic acid sequence of SEQ ID NO. 6376).

[0942] In some embodiments, the preferred reporter moiety may be luciferase proteins. In one embodiment, the reporter moiety is the Renilla luciferase, or a firefly luciferase. Table 43 provides the sequences of the reporter moieties. The amino acid sequences in Table 43 may comprise a stop codon which is denoted in the table with a “*” at the end of the amino acid sequence

TABLE 43
DD-luciferase constructs

| | | Amino Acid | Nucleic Acid |
|---|---|---|---|
| Description | Amino acid sequence | SEQ ID NO. | SEQ ID NO. |
| Linker | EF | — | |
| Linker | SG | — | |
| Renilla | MTSKVYDPEQRKRMITGPQWWARCKQMNVLDSFINYYDSEKHAEN | 3069 | 6377 |
| luciferase | AVIFLHGNAASSYLWRHVVPHIEPVARCIIPDLIGMGKSGKSGNG | | |
| | SYRLLDHYKYLTAWFELLNLPKKIIFVGHDWGACLAFHYSYEHQD | | |
| | KIKAIVHAESVVDVIESWDEWPDIEEDIALIKSEEGEKMVLENNF | | |
| | FVETMLPSKIMRKLEPEEFAAYLEPFKEKGEVRRPTLSWPREIPL | | |
| | VKGGKPDVVQIVRNYNAYLRASDDLPKMFIESDPGFFSNAIVEGA | | |
| | KKFPNTEFVKVKGLHFSQEDAPDEMGKYIKSFVERVLKNEQ | | |
| Firefly | MEDAKNIKKGPAPFYPLEDGTAGEQLHKAMKRYALVPGTIAFTDA | 3070 | 6378 |
| Luciferase | HIEVDITYAEYFEMSVRLAEAMKRYGLNTNHRIVVCSENSLQFFM | | |
| | PVLGALFIGVAVAPANDIYNERELLNSMGISQPTVVFVSKKGLQK | | |
| | ILNVQKKLPIIQKIIIMDSKTDYQGFQSMYTFVTSHLPPGFNEYD | | |
| | FVPESFDRDKTIALIMNSSGSTGLPKGVALPHRTACVRFSHARDP | | |
| | IFGNQIIPDTAILSVVPFHHGFGMFTTLGYLICGFRVVLMYRFEE | | |
| | ELFLRSLQDYKIQSALLVPTLFSFFAKSTLIDKYDLSNLHEIASG | | |
| | GAPLSKEVGEAVAKRFHLPGIRQGYGLTETTSAILITPEGDDKPG | | |
| | AVGKVVPFFEAKVVDLDTGKTLGVNQRGELCVRGPMIMSGYVNNP | | |
| | EATNALIDKDGWLHSGDIAYWDEDEHFFIVDRLKSLIKYKGYQVA | | |
| | PAELESILLQHPNIFDAGVAGLPDDDAGELPAAVVVLEHGKTMTE | | |
| | KEIVDYVASQVTTAKKLRGGVVFVDEVPKGLTGKLDARKIREILI | | |
| | KAKKGGKSKL | | |
| FKBP (F36V, | GVQVETISPGDGRTFPKRGQTCVVHYTGMLEDGKKVDSSRDRNKP | 2778 | 6379-6384 |
| L106P) | FKFMLGKQEVIRGWEEGVAQMSVGQRAKLTISPDYAYGATGHPGI | | |
| | IPPHATLVFDVELLKPE | | |
| FKBP (E31G, | GVQVETISPGDGRTFPKRGQTCVVHYTGMLGDGKKVDSSRDRNKP | 2775 | 6385-6392 |
| F36V, R71G, | FKFMLGKQEVIRGWEEGVAQMSVGQGAKLTISPDYAYGATGHPGI | | |
| K105E) | IPPHATLVFDVELLELE | | |
| ecDHFR | MISLIAALAVDYVIGMENAMPWNLPADLAWFKRNTLNKPVIMGRH | 2979 | 6393 |
| (R12Y, Y100I) | TWESIGRPLPGRKNIILSSQPGTDDRVTWVKSVDEAIAACGDVPE | | |
| | IMVIGGGRVIEQFLPKAQKLYLTHIDAEVEGDTHFPDYEPDDWES | | |
| | VFSEFHDADAQNSHSYCFEILERR | | |
| OT-Rluc-001 | MTSKVYDPEQRKRMITGPQWWARCKQMNVLDSFINYYDSEKHAEN | 3071 | 6394 |
| (Renilla Luc- | AVIFLHGNAASSYLWRHVVPHIEPVARCIIPDLIGMGKSGKSGNG | | |
| stop) | SYRLLDHYKYLTAWFELLNLPKKIIFVGHDWGACLAFHYSYEHQD | | |
| | KIKAIVHAESVVDVIESWDEWPDIEEDIALIKSEEGEKMVLENNF | | |
| | FVETMLPSKIMRKLEPEEFAAYLEPFKEKGEVRRPTLSWPREIPL | | |
| | VKGGKPDVVQIVRNYNAYLRASDDLPKMFIESDPGFFSNAIVEGA | | |
| | KKFPNTEFVKVKGLHFSQEDAPDEMGKYIKSFVERVLKNEQ* | | |
| OT-Flue-002 | MGVQVETISPGDGRTFPKRGQTCVVHYTGMLEDGKKVDSSRDRNK | 3072 | 6395 |
| (Met-FKBP | PFKFMLGKQEVIRGWEEGVAQMSVGQRAKLTISPDYAYGATGHPG | | |
| (F36V, | IIPPHATLVFDVELLKPEEFMEDAKNIKKGPAPFYPLEDGTAGEQ | | |
| L106P)- | LHKAMKRYALVPGTIAFTDAHIEVDITYAEYFEMSVRLAEAMKRY | | |
| Linker (EF)- | GLNTNHRIVVCSENSLQFFMPVLGALFIGVAVAPANDIYNERELL | | |
| Firefly Luc- | NSMGISQPTVVFVSKKGLQKILNVQKKLPIIQKIIIMDSKTDYQG | | |
| stop) | FQSMYTFVTSHLPPGFNEYDFVPESFDRDKTIALIMNSSGSTGLP | | |
| | KGVALPHRTACVRFSHARDPIFGNQIIPDTAILSVVPFHHGFGMF | | |
| | TTLGYLICGFRVVLMYRFEEELFLRSLQDYKIQSALLVPTLFSFF | | |
| | AKSTLIDKYDLSNLHEIASGGAPLSKEVGEAVAKRFHLPGIRQGY | | |
| | GLTETTSAILITPEGDDKPGAVGKVVPFFEAKVVDLDTGKTLGVN | | |
| | QRGELCVRGPMIMSGYVNNPEATNALIDKDGWLHSGDIAYWDEDE | | |
| | HFFIVDRLKSLIKYKGYQVAPAELESILLQHPNIFDAGVAGLPDD | | |
| | DAGELPAAVVVLEHGKTMTEKEIVDYVASQVTTAKKLRGGVVFVD | | |
| | EVPKGLTGKLDARKIREILIKAKKGGKSKL* | | |
| OT-Rluc-003 | MGVQVETISPGDGRTFPKRGQTCVVHYTGMLEDGKKVDSSRDRNK | 3073 | 6396 |
| (Met-FKBP | PFKFMLGKQEVIRGWEEGVAQMSVGQRAKLTISPDYAYGATGHPG | | |
| (F36V, | IIPPHATLVFDVELLKPESGTSKVYDPEQRKRMITGPQWWARCKQ | | |
| L106P)- | MNVLDSFINYYDSEKHAENAVIFLHGNAASSYLWRHVVPHIEPVA | | |
| Linker (SG)- | RCIIPDLIGMGKSGKSGNGSYRLLDHYKYLTAWFELLNLPKKIIF | | |
| Amino acid | VGHDWGACLAFHYSYEHQDKIKAIVHAESVVDVIESWDEWPDIEE | | |
| 2-311 of | DIALIKSEEGEKMVLENNFFVETMLPSKIMRKLEPEEFAAYLEPF | | |
| Renilla | KEKGEVRRPTLSWPREIPLVKGGKPDVVQIVRNYNAYLRASDDLP | | |
| Luciferase- | KMFIESDPGFFSNAIVEGAKKFPNTEFVKVKGLHFSQEDAPDEMG | | |
| stop) | KYIKSFVERVLKNEQ* | | |
| OT-Rluc-004 | MISLIAALAVDYVIGMENAMPWNLPADLAWFKRNTLNKPVIMGRH | 3074 | 6397 |
| (ecDHFR | TWESIGRPLPGRKNIILSSQPGTDDRVTWVKSVDEAIAACGDVPE | | |
| (R12Y, | IMVIGGGRVIEQFLPKAQKLYLTHIDAEVEGDTHFPDYEPDDWES | | |
| Y100I)- | VFSEFHDADAQNSHSYCFEILERRSGTSKVYDPEQRKRMITGPQW | | |
| Linker (SG)- | WARCKQMNVLDSFINYYDSEKHAENAVIFLHGNAASSYLWRHVVP | | |
| Amino acid | HIEPVARCIIPDLIGMGKSGKSGNGSYRLLDHYKYLTAWFELLNL | | |
| 2-311 of | PKKHFVGHDWGACLAFHYSYEHQDKIKAIVHAESVVDVIESWDEW | | |
| Renilla | PDIEEDIALIKSEEGEKMVLENNFFVETMLPSKIMRKLEPEEFAA | | |
| Luciferase- | YLEPFKEKGEVRRPTLSWPREIPLVKGGKPDVVQIVRNYNAYLRA | | |
| stop) | SDDLPKMFIESDPGFFSNAIVEGAKKFPNTEFVKVKGLHFSQEDA | | |
| | PDEMGKYIKSFVERVLKNEQ* | | |
| OT-Rluc-005 | MTSKVYDPEQRKRMITGPQWWARCKQMNVLDSFINYYDSEKHAEN | 3075 | 6398 |
| (Renilla Luc- | AVIFLHGNAASSYLWRHVVPHIEPVARCIIPDLIGMGKSGKSGNG | | |
| Linker (SG) - | SYRLLDHYKYLTAWFELLNLPKKIIFVGHDWGACLAFHYSYEHQD | | |
| FKBP (E31G, | KIKAIVHAESVVDVIESWDEWPDIEEDIALIKSEEGEKMVLENNF | | |
| F36V, R71G, | FVETMLPSKIMRKLEPEEFAAYLEPFKEKGEVRRPTLSWPREIPL | | |
| K105E)-stop) | VKGGKPDVVQIVRNYNAYLRASDDLPKMFIESDPGFFSNAIVEGA | | |
| | KKFPNTEFVKVKGLHFSQEDAPDEMGKYIKSFVERVLKNEQSGGV | | |
| | QVETISPGDGRTFPKRGQTCVVHYTGMLGDGKKVDSSRDRNKPFK | | |
| | FMLGKQEVIRGWEEGVAQMSVGQGAKLTISPDYAYGATGHPGIIP | | |
| | PHATLVFDVELLELE* | | |
| OT-Rluc-006 | MTSKVYDPEQRKRMITGPQWWARCKQMNVLDSFINYYDSEKHAEN | 3076 | 6399 |
| (Renilla Luc- | AVIFLHGNAASSYLWRHVVPHIEPVARCIIPDLIGMGKSGKSGNG | | |
| Linker (SG)- | SYRLLDHYKYLTAWFELLNLPKKIIFVGHDWGACLAFHYSYEHQD | | |
| ecDHFR | KIKAIVHAESVVDVIESWDEWPDIEEDIALIKSEEGEKMVLENNF | | |
| (Amino acid | FVETMLPSKIMRKLEPEEFAAYLEPFKEKGEVRRPTLSWPREIPL | | |
| 2-159 of WT) | VKGGKPDVVQIVRNYNAYLRASDDLPKMFIESDPGFFSNAIVEGA | | |
| (R12Y, | KKFPNTEFVKVKGLHFSQEDAPDEMGKYIKSFVERVLKNEQSGIS | | |
| Y100I)-stop) | LIAALAVDYVIGMENAMPWNLPADLAWFKRNTLNKPVIMGRHTWE | | |
| | SIGRPLPGRKNIILSSQPGTDDRVTWVKSVDEAIAACGDVPEIMV | | |
| | IGGGRVIEQFLPKAQKLYLTHIDAEVEGDTHFPDYEPDDWESVFS | | |
| | EFFIDADAQNSHSYCFEILERR* | | |

### Animal Models

[0943] The utility and efficacy of the compositions of the present invention may be tested in vivo animal models, preferably mouse models. Mouse models used to may be syngeneic mouse models wherein mouse cells are modified with compositions of the invention and tested in mice of the same genetic background. Examples include pMEL-1 and 4T1 mouse models. Alternatively, xenograft models where human cells such as tumor cells and immune cells are introduced into immunodeficient mice may also be utilized in such studies. Immunodeficient mice used may be CByJ.Cg-Foxn1^{nu}/J, B6; 129S7-Rag1^{tm1Mom}/J, B6.129S7-Rag1^{tm1Mom}/J, B6. CB17-Prkdc^{scid}/SzJ, NOD.129S7(B6)-Rag1^{tmMom}/J, NOD.Cg-Rag1^{tm1Mom}Prf1^{tm1Sd}z/Sz, NOD.CB17-Prkdc^{scid}/SzJ, NOD.Cg-Prkdc^{scid}B2^{tm1Unc}/J NOD-scid IL2Rg^{null}, Nude (nu) mice, SCID mice, NOD mice, RAG1/RAG2 mice, NOD-Scid mice, IL2rgnull mice, b2mnull mice, NOD-scid IL2rγnull mice, NOD-scid-B2mnull mice, beige mouse, and HLA transgenic mice.

### Cellular Assays

[0944] In some embodiments, the effectiveness of the compositions of the inventions as immunotherapeutic agents may be evaluated using cellular assays. Levels of expression and/or identity of the compositions of the invention may be determined according to any methods known in the art for identifying proteins and/or quantitating proteins levels. In some embodiments, such methods may include Western Blotting, flow cytometry, and immunoassays.

[0945] Provided herein are methods for functionally characterizing cells expressing SRE, biocircuits and compositions of the invention. In some embodiments, functional characterization is carried out in primary immune cells or immortalized immune cell lines and may be determined by expression of cell surface markers. Examples of cell surface markers for T cells include, but are not limited to, CD3, CD4, CD8, CD 14, CD20, CD11b, CD16, CD45 and HLA-DR, CD 69, CD28, CD44, IFNgamma. Markers for T cell exhaustion include PD1, TIM3, BTLA, CD160, 2B4, CD39, and LAG3. Examples of cell surface markers for antigen presenting cells include, but are not limited to, MHC class I, MHC Class II, CD40, CD45, B7-1, B7-2, IFN-7 receptor and IL2 receptor, ICAM-1 and/or Fcγ receptor. Examples of cell surface markers for dendritic cells include, but are not limited to, MHC class I, MHC Class II, B7-2, CD18, CD29, CD31, CD43, CD44, CD45, CD54, CD58, CD83, CD86, CMRF-44, CMRF-56, DCIR and/or Dectin-1 and the like; while in some cases also having the absence of CD2, CD3, CD4, CD8, CD14, CD15, CD16, CD 19, CD20, CD56, and/or CD57. Examples of cell surface markers for NK cells include, but are not limited to, CCL3, CCL4, CCL5, CCR4, CXCR4, CXCR3, NKG2D, CD71, CD69, CCR5, Phospho JAK/STAT, phospho ERK, phospho p38/MAPK, phospho AKT, phospho STAT3, Granulysin, Granzyme B, Granzyme K, IL10, IL22, IFNg, LAP, Perforin, and TNFa.

[0946] Provided herein are methods for functionally characterizing cells expressing SRE, biocircuits and compositions of the invention. In some embodiments, functional characterization is carried out in primary immune cells or immortalized immune cell lines and may be determined by expression of cell surface markers. Examples of cell surface markers for T cells include, but are not limited to, CD3, CD4, CD8, CD14, CD20, CD11b, CD16, CD45 and HLA-DR, CD 69, CD28, CD44, IFNgamma, PD1, TIM3 and LAG3. Examples of cell surface markers for antigen presenting cells include, but are not limited to, MHC class I, MHC Class II, CD40, CD45, B7-1, B7-2, IFN-7 receptor and IL2 receptor, ICAM-1 and/or Fcγ receptor. Examples of cell surface markers for dendritic cells include, but are not limited to, MHC class I, MHC Class II, B7-2, CD18, CD29, CD31, CD43, CD44, CD45, CD54, CD58, CD83, CD86, CMRF-44, CMRF-56, DCIR and/or Dectin-1 and the like; while in some cases also having the absence of CD2, CD3, CD4, CD8, CD14, CD15, CD16, CD 19, CD20, CD56, and/or CD57. Examples of cell surface markers for NK cells include, but are not limited to, CCL3, CCL4, CCL5, CCR4, CXCR4, CXCR3, NKG2D, CD71, CD69, CCR5, Phospho JAK/STAT, phospho ERK, phospho p38/MAPK, phospho AKT, phospho STAT3, Granulysin, Granzyme B, Granzyme K, IL10, IL22, IFNg, LAP, Perforin, and TNFa.

### V. DELIVERY MODALITIES AND/OR VECTORS

### Vectors

[0947] The present invention also provides vectors that package polynucleotides of the invention encoding biocircuits, effector modules, SREs (DDs) and payload constructs, and combinations thereof. Vectors of the present invention may also be used to deliver the packaged polynucleotides to a cell, a local tissue site or a subject. These vectors may be of any kind, including DNA vectors, RNA vectors, plasmids, viral vectors and particles. Viral vector technology is well known and described in Sambrook et al. (2001, Molecular Cloning: A Laboratory Manual, Cold Spring Harbor Laboratory, New York). Viruses, which are useful as vectors include, but are not limited to lentiviral vectors, adenoviral vectors, adeno-associated viral (AAV) vectors, herpes simplex viral vectors, retroviral vectors, oncolytic viruses, and the like.

[0948] In general, vectors contain an origin of replication functional in at least one organism, a promoter sequence and convenient restriction endonuclease site, and one or more selectable markers e.g. a drug resistance gene.

[0949] As used herein a promoter is defined as a DNA sequence recognized by transcription machinery of the cell, required to initiate specific transcription of the polynucleotide sequence of the present invention. Vectors can comprise native or non-native promoters operably linked to the polynucleotides of the invention. The promoters selected may be strong, weak, constitutive, inducible, tissue specific, development stage-specific, and/or organism specific. One example of a suitable promoter is the immediate early cytomegalovirus (CMV) promoter sequence. This promoter sequence is a strong constitutive promoter sequence capable of driving high levels of expression of polynucleotide sequence that is operatively linked to it. Another example of a preferred promoter is Elongation Growth Factor-1. Alpha (EF-1. alpha). Other constitutive promoters may also be used, including, but not limited to simian virus 40 (SV40), mouse mammary tumor virus (MMTV), human immunodeficiency virus (HIV), long terminal repeat (LTR), promoter, an avian leukemia virus promoter, an Epstein-Barr virus immediate early promoter, a Rous sarcoma virus promoter as well as human gene promoters including, but not limited to the phosphoglycerate kinase (PGK) promoter, actin promoter, the myosin promoter, the hemoglobin promoter, the Ubiquitin C (Ubc) promoter, the human U6 small nuclear protein promoter and the creatine kinase promoter. In some instances, inducible promoters such as but not limited to metallothionine promoter, glucocorticoid promoter, a progesterone promoter, and a tetracycline promoter may be used. In some embodiments, the promoter may be selected from the SEQ ID NO.: 6400-6402. In some embodiments, the promoter may be selected from the SEQ. ID NO. 6403-6405 and 6406. In some embodiments, the promoter may be selected from the SEQ ID NO. 6407-6410. In some embodiments, the promoter may be selected from the SEQ ID NO. 3095-3097, SEQ ID NO. 3098.

[0950] In some embodiments, the optimal promoter may be selected based on its ability to achieve minimal expression of the SREs and payloads of the invention in the absence of the ligand and detectable expression in the presence of the ligand.

[0951] Additional promoter elements e.g. enhancers may be used to regulate the frequency of transcriptional initiation. Such regions may be located 10-100 base pairs upstream or downstream of the start site. In some instances, two or more promoter elements may be used to cooperatively or independently activate transcription.

[0952] Suitable vectors include those designed for propagation and expansion or for expression or both, such as plasmids and viruses. The vector can be selected from the group consisting of the pUC series (Fermentas Life Sciences, Glen Burnie, MD), the pBluescript series (Stratagene, La Jolla, CA), the pET series (Novagen, Madison, WI), the pGEX series (Pharmacia Biotech, Uppsala, Sweden), and the pEX series (Clontech, Palo Alto, CA). Bacteriophage vectors, such as λGT10, λGT11, λZapII (Stratagene), λEMBL4, and λNM1 149, also can be used. Examples of plant expression vectors include pBI01, pBI101.2, pBI101.3, pBIl21 and pBIN19 (Clontech). Examples of animal expression vectors include pEUK-Cl, pMAM, and pMAMneo (Clontech). The recombinant expression vector may be a viral vector, e.g., a retroviral vector or a lenti viral vector. In some embodiments, the vector can be a transposon. Any of the vectors disclosed in the International Patent Publication WO2014065961, may be useful in the present invention (the contents of which are incorporated herein by reference in their entirety).

[0953] In some embodiments, the recombinant expression vector may comprise regulatory sequences, such as transcription and translation initiation and termination codons, which are specific to the type of host cell into which the vector is to be introduced.

### 1. Lentiviral Vectors

[0954] In some embodiments, lentiviral vectors/particles may be used as vehicles and delivery modalities. Lentiviruses are subgroup of the Retroviridae family of viruses, named because reverse transcription of viral RNA genomes to DNA is required before integration into the host genome. As such, the most important features of lentiviral vehicles/particles are the integration of their genetic material into the genome of a target/host cell. Some examples of lentivirus include the Human Immunodeficiency Viruses: HIV-1 and HIV-2, the Simian Immunodeficiency Virus (SIV), feline immunodeficiency virus (FIV), bovine immunodeficiency virus (BIV), Jembrana Disease Virus (JDV), equine infectious anemia virus (EIAV), equine infectious anemia virus, visna-maedi and caprine arthritis encephalitis virus (CAEV).

[0955] Typically, lentiviral particles making up the gene delivery vehicle are replication defective on their own (also referred to as “self-inactivating”). Lentiviruses are able to infect both dividing and non-dividing cells by virtue of the entry mechanism through the intact host nuclear envelope (Naldini L et al., Curr. Opin. Biotechnol, 1998, 9: 457-463). Recombinant lentiviral vehicles/particles have been generated by multiply attenuating the HIV virulence genes, for example, the genes Env, Vif, Vpr, Vpu, Nef and Tat are deleted making the vector biologically safe. Correspondingly, lentiviral vehicles, for example, derived from HIV-1/HIV-2 can mediate the efficient delivery, integration and long-term expression of transgenes into non-dividing cells. As used herein, the term “recombinant” refers to a vector or other nucleic acid containing both lentiviral sequences and non-lentiviral retroviral sequences.

[0956] Lentiviral particles may be generated by co-expressing the virus packaging elements and the vector genome itself in a producer cell such as human HEK293T cells. These elements are usually provided in three (in second generation lentiviral systems) or four separate plasmids (in third generation lentiviral systems). The producer cells are co-transfected with plasmids that encode lentiviral components including the core (i.e. structural proteins) and enzymatic components of the virus, and the envelope protein(s) (referred to as the packaging systems), and a plasmid that encodes the genome including a foreign transgene, to be transferred to the target cell, the vehicle itself (also referred to as the transfer vector). In general, the plasmids or vectors are included in a producer cell line. The plasmids/vectors are introduced via transfection, transduction or infection into the producer cell line. Methods for transfection, transduction or infection are well known by those of skill in the art. As non-limiting example, the packaging and transfer constructs can be introduced into producer cell lines by calcium phosphate transfection, lipofection or electroporation, generally together with a dominant selectable marker, such as neo, DHFR, Gln synthetase or ADA, followed by selection in the presence of the appropriate drug and isolation of clones.

[0957] The producer cell produces recombinant viral particles that contain the foreign gene, for example, the effector module of the present invention. The recombinant viral particles are recovered from the culture media and titrated by standard methods used by those of skill in the art. The recombinant lentiviral vehicles can be used to infect target cells.

[0958] Cells that can be used to produce high-titer lentiviral particles may include, but are not limited to, HEK293T cells, 293G cells, STAR cells (Relander et al., Mol. Ther., 2005, 11: 452-459), FreeStyle™ 293 Expression System (ThermoFisher, Waltham, MA), and other HEK293T-based producer cell lines (e.g., Stewart et al., Hum Gene Ther. 2011, 22(3):357-369; Lee et al., Biotechnol Bioeng, 2012, 10996): 1551-1560; Throm et al., Blood. 2009, 113(21): 5104-5110; the contents of each of which are incorporated herein by reference in their entirety).

[0959] In some aspects, the envelope proteins may be heterologous envelop proteins from other viruses, such as the G protein of vesicular stomatitis virus (VSV G) or baculoviral gp64 envelop proteins. The VSV-G glycoprotein may especially be chosen among species classified in the vesiculovirus genus: Carajas virus (CJSV), Chandipura virus (CHPV), Cocal virus (COCV), Isfahan virus (ISFV), Maraba virus (MARAV), Piry virus (PIRYV), Vesicular stomatitis Alagoas virus (VSAV), Vesicular stomatitis Indiana virus (VSIV) and Vesicular stomatitis New Jersey virus (VSNJV) and/or stains provisionally classified in the vesiculovirus genus as Grass carp rhabdovirus, BeAn 157575 virus (BeAn 157575), Boteke virus (BTKV), Calchaqui virus (CQIV), Eel virus American (EVA), Gray Lodge virus (GLOV), Jurona virus (JURY), Klamath virus (KLAV), Kwatta virus (KWAV), La Joya virus (LJV), Malpais Spring virus (MSPV), Mount Elgon bat virus (MEBV), Perinet virus (PERV), Pike fry rhabdovirus (PFRV), Porton virus (PORV), Radi virus (RADIV), Spring viremia of carp virus (SVCV), Tupaia virus (TUPV), Ulcerative disease rhabdovirus (UDRV) and YugBogdanovac virus (YBV). The gp64 or other baculoviral env protein can be derived from Autographa californica nucleopolyhedrovirus (AcMNPV), Anagrapha falcifera nuclear polyhedrosis virus, Bombyx mori nuclear polyhedrosis virus, Choristoneura fumiferana nucleopolyhedrovirus, Orgyia pseudotsugata single capsid nuclear polyhedrosis virus, Epiphyas postvittana nucleopolyhedrovirus, Hyphantria cunea nucleopolyhedrovirus, Galleria mellonella nuclear polyhedrosis virus, Dhori virus, Thogoto virus, Antheraea pemyi nucleopolyhedrovirus or Batken virus.

[0960] Additional elements provided in lentiviral particles may comprise retroviral LTR (long-terminal repeat) at either 5′ or 3′ terminus, a retroviral export element, optionally a lentiviral reverse response element (RRE), a promoter or active portion thereof, and a locus control region (LCR) or active portion thereof. Other elements include central polypurine tract (cPPT) sequence to improve transduction efficiency in non-dividing cells, Woodchuck Hepatitis Virus (WHP) Posttranscriptional Regulatory Element (WPRE) which enhances the expression of the transgene, and increases titer. The effector module is linked to the vector.

[0961] Methods for generating recombinant lentiviral particles are discussed in the art, for example, U.S. Pat. Nos. 8,846,385; 7,745, 179; 7,629,153; 7,575,924; 7,179, 903; and 6,808,905; the contents of each of which are incorporated herein by reference in their entirety.

[0962] Lentivirus vectors used may be selected from, but are not limited to pLVX, pLenti, pLenti6, pLJM1, FUGW, pWPXL, pWPI, pLenti CMV puro DEST, pLJM1-EGFP, pULTRA, pInducer20, pHIV-EGFP, pCW57.1, pTRPE, pELPS, pRRL, and pLionII.

[0963] Lentiviral vehicles known in the art may also be used (See, U.S. Pat. Nos. 9,260,725; 9,068,199; 9,023,646; 8,900,858; 8,748,169; 8,709,799; 8,420,104; 8,329,462; 8,076,106; 6,013,516; and 5,994,136; International Patent Publication NO.: WO2012079000; the contents of each of which are incorporated herein by reference in their entirety).

### 2. Retroviral Vectors (γ-Retroviral Vectors)

[0964] In some embodiments, retroviral vectors may be used to package and deliver the biocircuits, biocircuit components, effector modules, SREs or payload constructs of the present invention. Retroviral vectors (RVs) allow the permanent integration of a transgene in target cells. In addition to lentiviral vectors based on complex HIV-1/2, retroviral vectors based on simple gamma-retroviruses have been widely used to deliver therapeutic genes and demonstrated clinically as one of the most efficient and powerful gene delivery systems capable of transducing a broad range of cell types. Example species of Gamma retroviruses include the murine leukemia viruses (MLVs) and the feline leukemia viruses (FeLV).

[0965] In some embodiments, gamma-retroviral vectors derived from a mammalian gamma-retrovirus such as murine leukemia viruses (MLVs), are recombinant. The MLV families of gamma retroviruses include the ecotropic, amphotropic, xenotropic and polytropic subfamilies. Ecotropic viruses are able to infect only murine cells using mCAT-1 receptor. Examples of ecotropic viruses are Moloney MLV and AKV. Amphotropic viruses infect murine, human and other species through the Pit-2 receptor. One example of an amphotropic virus is the 4070A virus. Xenotropic and polytropic viruses utilize the same (Xpr1) receptor, but differ in their species tropism. Xenotropic viruses such as NZB-9-1 infect human and other species but not murine species, whereas polytropic viruses such as focus-forming viruses (MCF) infect murine, human and other species.

[0966] Gamma-retroviral vectors may be produced in packaging cells by co-transfecting the cells with several plasmids including one encoding the retroviral structural and enzymatic (gag-pol) polyprotein, one encoding the envelope (env) protein, and one encoding the vector mRNA comprising polynucleotide encoding the compositions of the present invention that is to be packaged in newly formed viral particles.

[0967] In some aspects, the recombinant gamma-retroviral vectors are pseudotyped with envelope proteins from other viruses. Envelope glycoproteins are incorporated in the outer lipid layer of the viral particles which can increase/alter the cell tropism. Exemplary envelop proteins include the gibbon ape leukemia virus envelope protein (GALV) or vesicular stomatitis virus G protein (VSV-G), or Simian endogenous retrovirus envelop protein, or Measles Virus H and F proteins, or Human immunodeficiency virus gp120 envelope protein, or cocal vesiculovirus envelop protein (See, e.g., U.S. application publication NO.: 2012/164118; the contents of which are incorporated herein by reference in its entirety). In other aspects, envelope glycoproteins may be genetically modified to incorporate targeting/binding ligands into gamma-retroviral vectors, binding ligands including, but not limited to, peptide ligands, single chain antibodies and growth factors (Waehler et al., Nat. Rev. Genet. 2007, 8(8):573-587; the contents of which are incorporated herein by reference in its entirety). These engineered glycoproteins can retarget vectors to cells expressing their corresponding target moieties. In other aspects, a “molecular bridge” may be introduced to direct vectors to specific cells. The molecular bridge has dual specificities: one end can recognize viral glycoproteins, and the other end can bind to the molecular determinant on the target cell. Such molecular bridges, for example ligand-receptor, avidin-biotin, and chemical conjugations, monoclonal antibodies and engineered fusogenic proteins, can direct the attachment of viral vectors to target cells for transduction (Yang et al., Biotechnol. Bioeng., 2008, 101(2): 357-368; and Maetzig et al., Viruses, 2011, 3, 677-713; the contents of each of which are incorporated herein by reference in their entirety).

[0968] In some embodiments, the recombinant gamma-retroviral vectors are self-inactivating (SIN) gammaretroviral vectors. The vectors are replication incompetent. SIN vectors may harbor a deletion within the 3′ U3 region initially comprising enhancer/promoter activity. Furthermore, the 5′ U3 region may be replaced with strong promoters (needed in the packaging cell line) derived from Cytomegalovirus or RSV, or an internal promoter of choice, and/or an enhancer element. The choice of the internal promoters may be made according to specific requirements of gene expression needed for a particular purpose of the invention.

[0969] In some embodiments, polynucleotides encoding the biocircuit, biocircuit components, effector module, SRE are inserted within the recombinant viral genome. The other components of the viral mRNA of a recombinant gamma-retroviral vector may be modified by insertion or removal of naturally occurring sequences (e.g., insertion of an IRES, insertion of a heterologous polynucleotide encoding a polypeptide or inhibitory nucleic acid of interest, shuffling of a more effective promoter from a different retrovirus or virus in place of the wild-type promoter and the like). In some examples, the recombinant gamma-retroviral vectors may comprise modified packaging signal, and/or primer binding site (PBS), and/or 5′-enhancer/promoter elements in the U3-region of the 5′-long terminal repeat (LTR), and/or 3′-SIN elements modified in the U3-region of the 3′-LTR. These modifications may increase the titers and the ability of infection.

[0970] Gamma retroviral vectors suitable for delivering biocircuit components, effector modules, SREs or payload constructs of the present invention may be selected from those disclosed in U.S. Pat. Nos. 8,828,718; 7,585,676; 7,351,585; U.S. application publication NO.: 2007/048285; PCT application publication NOs.: WO2010/113037; WO2014/121005; WO2015/056014; and EP Pat. NOs.: EP1757702; EP1757703 (the contents of each of which are incorporated herein by reference in their entirety).

### 3. Adeno-Associated Viral Vectors (AAV)

[0971] In some embodiments, polynucleotides of present invention may be packaged into recombinant adeno-associated viral (rAAV) vectors. Such vectors or viral particles may be designed to utilize any of the known serotype capsids or combinations of serotype capsids. The serotype capsids may include capsids from any identified AAV serotypes and variants thereof, for example, AAV1, AAV2, AAV2G9, AAV3, AAV4, AAV4-4, AAV5, AAV6, AAV7, AAV8, AAV9, AAV10, AAV11, AAV12 and AAVrh10.

[0972] In one embodiment, the AAV serotype may be or have a sequence as described in United States Publication No. US20030138772, herein incorporated by reference in its entirety, such as, but not limited to, AAV1 (SEQ ID NO: 6 and 64 of US20030138772), AAV2 (SEQ ID NO: 7 and 70 of US20030138772), AAV3 (SEQ ID NO: 8 and 71 of US20030138772), AAV4 (SEQ ID NO: 63 of US20030138772), AAV5 (SEQ ID NO: 114 of US20030138772), AAV6 (SEQ ID NO: 65 of US20030138772), AAV7 (SEQ ID NO: 1-3 of US20030138772), AAV8 (SEQ ID NO: 4 and 95 of US20030138772), AAV9 (SEQ ID NO: 5 and 100 of US20030138772), AAV10 (SEQ ID NO: 117 of US20030138772), AAV11 (SEQ ID NO: 118 of US20030138772), AAV12 (SEQ ID NO: 119 of US20030138772), AAVrh10 (amino acids 1 to 738 of SEQ ID NO: 81 of US20030138772) or variants thereof. Non-limiting examples of variants include SEQ ID NOs: 9, 27-45, 47-62, 66-69, 73-81, 84-94, 96, 97, 99, 101-113 of US20030138772, the contents of which are herein incorporated by reference in their entirety.

[0973] In one embodiment, the AAV serotype may have a sequence as described in Pulicherla et al. (Molecular Therapy, 2011, 19(6):1070-1078), U.S. Pat. Nos. 6,156,303; 7,198,951; U.S. Patent Publication NOs.: US2015/0159173 and US2014/0359799; and International Patent Publication NOs.: WO1998/011244, WO2005/033321 and WO2014/14422; the contents of each of which are incorporated herein by reference in their entirety.

[0974] AAV vectors include not only single stranded vectors but self-complementary AAV vectors (scAAVs). scAAV vectors contain DNA which anneals together to form double stranded vector genome. By skipping second strand synthesis, scAAVs allow for rapid expression in the cell.

[0975] The rAAV vectors may be manufactured by standard methods in the art such as by triple transfection, in sf9 insect cells or in suspension cell cultures of human cells such as HEK293 cells.

[0976] The biocircuits, biocircuit components, effector modules, SREs or payload constructs may be encoded in one or more viral genomes to be packaged in the AAV capsids taught herein.

[0977] Such vectors or viral genomes may also include, in addition to at least one or two ITRs (inverted terminal repeats), certain regulatory elements necessary for expression from the vector or viral genome. Such regulatory elements are well known in the art and include for example promoters, introns, spacers, stuffer sequences, and the like.

[0978] In some embodiments, more than one effector module or SRE (e.g. DD) may be encoded in a viral genome.

### 4. Oncolytic Viral Vector

[0979] In some embodiments, polynucleotides of present invention may be packaged into oncolytic viruses, such as vaccine viruses. Oncolytic vaccine viruses may include viral particles of a thymidine kinase (TK)-deficient, granulocyte macrophage (GM)-colony stimulating factor (CSF)-expressing, replication-competent vaccinia virus vector sufficient to induce oncolysis of cells in the tumor (e.g., U.S. Pat. No. 9,226,977; the contents of which are incorporated by reference in their entirety).

5. Messenger RNA (mRNA)

[0980] In some embodiments, the effector modules of the invention may be designed as a messenger RNA (mRNA). As used herein, the term “messenger RNA” (mRNA) refers to any polynucleotide which encodes a polypeptide of interest and which is capable of being translated to produce the encoded polypeptide of interest in vitro, in vivo, in situ or ex vivo. Such mRNA molecules may have the structural components or features of any of those taught in International Application number PCT/US2013/030062, the contents of which are incorporated herein by reference in its entirety.

[0981] Polynucleotides of the invention may also be designed as taught in, for example, Ribostem Limited in United Kingdom patent application serial number 0316089.2 filed on Jul. 9, 2003 now abandoned, PCT application number PCT/GB2004/002981 filed on Jul. 9, 2004 published as WO2005005622, U.S. patent application national phase entry Ser. No. 10/563,897 filed on Jun. 8, 2006 published as US20060247195 now abandoned, and European patent application national phase entry serial number EP2004743322 filed on Jul. 9, 2004 published as EP1646714 now withdrawn; Novozymes, Inc. in PCT application number PCT/US2007/88060 filed on Dec. 19, 2007 published as WO2008140615, U.S. patent application national phase entry Ser. No. 12/520,072 filed on Jul. 2, 2009 published as US20100028943 and European patent application national phase entry serial number EP2007874376 filed on Jul. 7, 2009 published as EP2104739; University of Rochester in PCT application number PCT/US2006/46120 filed on Dec. 4, 2006 published as WO2007064952 and U.S. patent application Ser. No. 11/606,995 filed on Dec. 1, 2006 published as US20070141030; BioNTech AG in European patent application serial number EP2007024312 filed Dec. 14, 2007 now abandoned, PCT application number PCT/EP2008/01059 filed on Dec. 12, 2008 published as WO2009077134, European patent application national phase entry serial number EP2008861423 filed on Jun. 2, 2010 published as EP2240572, U.S. patent application national phase entry Ser. No. 12/735,060 filed Nov. 24, 2010 published as US20110065103, German patent application serial number DE 10 2005 046 490 filed Sep. 28, 2005, PCT application PCT/EP2006/0448 filed Sep. 28, 2006 published as WO2007036366, national phase European patent EP1934345 published Mar. 21, 2012 and national phase U.S. patent application Ser. No. 11/992,638 filed Aug. 14, 2009 published as 20100129877; Immune Disease Institute Inc. in U.S. patent application Ser. No. 13/088,009 filed Apr. 15, 2011 published as US20120046346 and PCT application PCT/US2011/32679 filed Apr. 15, 2011 published as WO20110130624; Shire Human Genetic Therapeutics in U.S. patent application Ser. No. 12/957,340 filed on Nov. 20, 2010 published as US20110244026; Sequitur Inc. in PCT application PCT/US1998/019492 filed on Sep. 18, 1998 published as WO1999014346; The Scripps Research Institute in PCT application number PCT/US2010/00567 filed on Feb. 24, 2010 published as WO2010098861, and U.S. patent application national phase entry Ser. No. 13/203,229 filed Nov. 3, 2011 published as US20120053333; Ludwig-Maximillians University in PCT application number PCT/EP2010/004681 filed on Jul. 30, 2010 published as WO2011012316; Cellscript Inc. in U.S. Pat. No. 8,039,214 filed Jun. 30, 2008 and granted Oct. 18, 2011, U.S. patent application Ser. No. 12/962,498 filed on Dec. 7, 2010 published as US20110143436, Ser. No. 12/962,468 filed on Dec. 7, 2010 published as US20110143397, Ser. No. 13/237,451 filed on Sep. 20, 2011 published as US20120009649, and PCT applications PCT/US2010/59305 filed Dec. 7, 2010 published as WO2011071931 and PCT/US2010/59317 filed on Dec. 7, 2010 published as WO2011071936; The Trustees of the University of Pennsylvania in PCT application number PCT/US2006/32372 filed on Aug. 21, 2006 published as WO2007024708, and U.S. patent application national phase entry Ser. No. 11/990,646 filed on Mar. 27, 2009 published as US20090286852; Curevac GMBH in German patent application serial numbers DE10 2001 027 283.9 filed Jun. 5, 2001, DE10 2001 062 480.8 filed Dec. 19, 2001, and DE 20 2006 051 516 filed Oct. 31, 2006 all abandoned, European patent numbers EP1392341 granted Mar. 30, 2005 and EP1458410 granted Jan. 2, 2008, PCT application numbers PCT/EP2002/06180 filed Jun. 5, 2002 published as WO2002098443, PCT/EP2002/14577 filed on Dec. 19, 2002 published as WO2003051401, PCT/EP2007/09469 filed on Dec. 31, 2007 published as WO2008052770, PCT/EP2008/03033 filed on Apr. 16, 2008 published as WO2009127230, PCT/EP2006/004784 filed on May 19, 2005 published as WO2006122828, PCT/EP2008/00081 filed on Jan. 9, 2007 published as WO2008083949, and U.S. patent application Ser. No. 10/729,830 filed on Dec. 5, 2003 published as US20050032730, Ser. No. 10/870,110 filed on Jun. 18, 2004 published as US20050059624, Ser. No. 11/914,945 filed on Jul. 7, 2008 published as US20080267873, Ser. No. 12/446,912 filed on Oct. 27, 2009 published as US2010047261 now abandoned, Ser. No. 12/522,214 filed on Jan. 4, 2010 published as US20100189729, Ser. No. 12/787,566 filed on May 26, 2010 published as US20110077287, Ser. No. 12/787,755 filed on May 26, 2010 published as US20100239608, Ser. No. 13/185,119 filed on Jul. 18, 2011 published as US20110269950, and Ser. No. 13/106,548 filed on May 12, 2011 published as US20110311472 all of which are herein incorporated by reference in their entirety.

[0982] In some embodiments, the effector modules may be designed as self-amplifying RNA. “Self-amplifying RNA” as used herein refers to RNA molecules that can replicate in the host resulting in the increase in the amount of the RNA and the protein encoded by the RNA. Such self-amplifying RNA may have structural features or components of any of those taught in International Patent Application Publication No. WO2011005799 (the contents of which are incorporated herein by reference in their entirety).

### VI. DOSING, DELIVERY AND ADMINISTRATIONS

[0983] The compositions of the invention may be delivered to a cell or a subject through one or more routes and modalities. The viral vectors containing one or more effector modules, SREs, immunotherapeutic agents and other components described herein may be used to deliver them to a cell and/or a subject. Other modalities may also be used such as mRNAs, plasmids, and as recombinant proteins.

### 1. Delivery to Cells

[0984] In another aspect of the invention, polynucleotides encoding biocircuits, effector modules, SREs (e.g., DDs), payloads of interest (immunotherapeutic agents) and compositions of the invention and vectors comprising said polynucleotides may be introduced into cells such as immune effector cells.

[0985] In one aspect of the invention, polynucleotides encoding biocircuits, effector modules, SREs (e.g., DDs), payloads of interest (immunotherapeutic agents) and compositions of the invention, may be packaged into viral vectors or integrated into viral genomes allowing transient or stable expression of the polynucleotides. Preferable viral vectors are retroviral vectors including lentiviral vectors. In order to construct a retroviral vector, a polynucleotide molecule encoding a biocircuit, an effector module, a DD or a payload of interest (i.e. an immunotherapeutic agent) is inserted into the viral genome in the place of certain viral sequences to produce a virus that is replication-defective. The recombinant viral vector is then introduced into a packaging cell line containing the gag, pol, and env genes, but without the LTR and packaging components. The recombinant retroviral particles are secreted into the culture media, then collected, optionally concentrated, and used for gene transfer. Lentiviral vectors are especially preferred as they are capable of infecting both dividing and non-dividing cells.

[0986] Vectors may also be transferred to cells by non-viral methods by physical methods such as needles, electroporation, sonoporation, hyrdoporation; chemical carriers such as inorganic particles (e.g. calcium phosphate, silica, gold) and/or chemical methods. In some embodiments, synthetic or natural biodegradable agents may be used for delivery such as cationic lipids, lipid nano emulsions, nanoparticles, peptide based vectors, or polymer based vectors.

[0987] In some embodiments, the polypeptides of the invention may be delivered to the cell directly. In one embodiment, the polypeptides of the invention may be delivered using synthetic peptides comprising an endosomal leakage domain (ELD) fused to a cell penetration domain (CLD). The polypeptides of the invention are co introduced into the cell with the ELD-CLD-synthetic peptide. ELDs facilitate the escape of proteins that are trapped in the endosome, into the cytosol. Such domains are derived proteins of microbial and viral origin and have been described in the art. CPDs allow the transport of proteins across the plasma membrane and have also been described in the art. The ELD-CLD fusion proteins synergistically increase the transduction efficiency when compared to the co-transduction with either domain alone. In some embodiments, a histidine rich domain may optionally be added to the shuttle construct as an additional method of allowing the escape of the cargo from the endosome into the cytosol. The shuttle may also include a cysteine residue at the N or C terminus to generate multimers of the fusion peptide. Multimers of the ELD-CLD fusion peptides generated by the addition of cysteine residue to the terminus of the peptide show even greater transduction efficiency when compared to the single fusion peptide constructs. The polypeptides of the invention may also be appended to appropriate localization signals to direct the cargo to the appropriate sub-cellular location e.g. nucleus. In some embodiments any of the ELDs, CLDs or the fusion ELD-CLD synthetic peptides taught in the International Patent Publication, WO2016161516 and WO2017175072 may be useful in the present invention (the contents of each of which are herein incorporated by reference in their entirety).

### 2. Dosing

[0988] The present invention provides methods comprising administering any one or more compositions for immunotherapy to a subject in need thereof. These may be administered to a subject using any amount and any route of administration effective for preventing or treating a clinical condition such as cancer, infection diseases and other immunodeficient diseases.

[0989] Compositions in accordance with the invention are typically formulated in dosage unit form for ease of administration and uniformity of dosage. It will be understood, however, that the total daily usage of the compositions of the present invention may be decided by the attending physician within the scope of sound medical judgment. The specific therapeutically effective, or prophylactically effective dose level for any particular patient will depend upon a variety of factors including the disorder being treated and the severity of the disorder; the activity of the specific compound employed; the specific composition employed; the age, body weight, general health, sex and diet of the patient; the time of administration, route of administration, previous or concurrent therapeutic interventions and rate of excretion of the specific compound employed; the duration of the treatment; drugs used in combination or coincidental with the specific compound employed; and like factors well known in the medical arts.

[0990] Compositions of the invention may be used in varying doses to avoid T cell energy, prevent cytokine release syndrome and minimize toxicity associated with immunotherapy. For example, low doses of the compositions of the present invention may be used to initially treat patients with high tumor burden, while patients with low tumor burden may be treated with high and repeated doses of the compositions of the invention to ensure recognition of a minimal tumor antigen load. In another instance, the compositions of the present invention may be delivered in a pulsatile fashion to reduce tonic T cell signaling and enhance persistence in vivo. In some aspects, toxicity may be minimized by initially using low doses of the compositions of the invention, prior to administering high doses. Dosing may be modified if serum markers such as ferritin, serum C-reactive protein, IL6, IFN-7, and TNF-α are elevated.

[0991] In some embodiments, the neurotoxicity may be associated with CAR or TIL therapy. Such neurotoxicity may be associated CD19-CARs. Toxicity may be due to excessive T cell infiltration into the brain. In some embodiments, neurotoxicity may be alleviated by preventing the passage of T cells through the blood brain barrier. This can be achieved by the targeted gene deletion of the endogenous alpha-4 integrin inhibitors such as tysabri/natalizumab may also be useful in the present invention.

[0992] In some embodiments, the compositions of the invention may initially be delivered in a low priming single dose followed by a multiple dose regimen to limit the toxicity associated with IL12 (Lasek W, et al. (2014) Cancer Immunol Immunother. 63:419-35).

### 3. Administration

[0993] In some embodiments, the compositions for immunotherapy may be administered to cells ex vivo and subsequently administered to the subject. Immune cells can be isolated and expanded ex vivo using a variety of methods known in the art. For example, methods of isolating cytotoxic T cells are described in U.S. Pat. Nos. 6,805,861 and 6,531,451; the contents of each of which are incorporated herein by reference in their entirety. Isolation of NK cells is described in U.S. Pat. No. 7,435,596; the contents of which are incorporated by reference herein in its entirety.

[0994] In some embodiments, compositions of the present invention, may be administered by any of the methods of administration taught in the copending commonly owned U.S. Provisional Patent Application No. 62/320,864 filed on Apr. 11, 2016, or in U.S. Provisional Application No. 62/466,596 filed Mar. 3, 2017 and the International Publication WO2017/180587, the contents of each of which are incorporated herein by reference in their entirety.

[0995] In some embodiments, depending upon the nature of the cells, the cells may be introduced into a host organism e.g. a mammal, in a wide variety of ways including by injection, transfusion, infusion, local instillation or implantation. In some aspects, the cells of the invention may be introduced at the site of the tumor. The number of cells that are employed will depend upon a number of circumstances, the purpose for the introduction, the lifetime of the cells, the protocol to be used, for example, the number of administrations, the ability of the cells to multiply, or the like. The cells may be in a physiologically-acceptable medium.

[0996] In some embodiments, the cells of the invention may be administrated in multiple doses to subjects having a disease or condition. The administrations generally effect an improvement in one or more symptoms of cancer or a clinical condition and/or treat or prevent cancer or clinical condition or symptom thereof.

[0997] In some embodiments, the compositions for immunotherapy may be administered in vivo. In some embodiments, polypeptides of the present invention comprising biocircuits, effector molecules, SREs, payloads of interest (immunotherapeutic agents) and compositions of the invention may be delivered in vivo to the subject. In vivo delivery of immunotherapeutic agents is well described in the art. For example, methods of delivery of cytokines are described in the E.P. Pat. No.: EP0930892 A1, the contents of which are incorporated herein by reference.

[0998] In one embodiment, the payloads of the present invention may be administered in conjunction with inhibitors of SHP-1 and/or SHP-2. The tyrosine-protein phosphatase SHP1 (also known as PTPN6) and SHP2 (also known as PTPN11) are involved in the Programmed Cell Death (PD1) inhibitory signaling pathway. The intracellular domain of PD1 contains an immunoreceptor tyrosine-based inhibitory motif (ITIM) and an immunoreceptor tyrosine-based switch motif (ITSM). ITSM has been shown to recruit SHP-1 and 2. This generates negative costimulatory micro clusters that induce the dephosphorylation of the proximal TCR signaling molecules, thereby resulting in suppression of T cell activation, which can lead to T cell exhaustion. In one embodiment, inhibitors of SHP-1 and 2 may include expressing dominant negative versions of the proteins in T cells, TILs or other cell types to relieve exhaustion. Such mutants can bind to the endogenous, catalytically active proteins, and inhibit their function. In one embodiment, the dominant negative mutant of SHP-1 and/or SHP-2 lack the phosphatase domain required for catalytic activity. In some embodiments, any of the dominant negative SHP-1 mutants taught Bergeron S et al. (2011). Endocrinology. 2011 December; 152(12):4581-8.; Dustin J B et al. (1999) J Immunol. March 1; 162(5):2717-24.; Berchtold S (1998) Mol Endocrinol. April; 12(4):556-67 and Schram et al. (2012) Am J Physiol Heart Circ Physiol. 1; 302(1):H231-43.; may be useful in the invention (the contents of each of which are incorporated by reference in their entirety).

### Routes of Delivery

[0999] The pharmaceutical compositions, biocircuits, biocircuit components, effector modules including their SREs (e.g., DDs), payloads (i.e. immunotherapeutic agents), vectors and cells of the present invention may be administered by any route to achieve a therapeutically effective outcome.

[1000] These include, but are not limited to enteral (into the intestine), gastroenteral, epidural (into the dura matter), oral (by way of the mouth), transdermal, peridural, intracerebral (into the cerebrum), intracerebroventricular (into the cerebral ventricles), epicutaneous (application onto the skin), intradermal, (into the skin itself), subcutaneous (under the skin), nasal administration (through the nose), intravenous (into a vein), intravenous bolus, intravenous drip, intra-arterial (into an artery), intramuscular (into a muscle), intracranial (into the heart), intraosseous infusion (into the bone marrow), intrathecal (into the spinal canal), intraperitoneal, (infusion or injection into the peritoneum), intrasinal infusion, intravitreal, (through the eye), intravenous injection (into a pathologic cavity) intracavitary (into the base of the penis), intravaginal administration, intrauterine, extra-amniotic administration, transdermal (diffusion through the intact skin for systemic distribution), transmucosal (diffusion through a mucous membrane), transvaginal, insufflation (snorting), sublingual, sublabial, enema, eye drops (onto the conjunctiva), in ear drops, auricular (in or by way of the ear), buccal (directed toward the cheek), conjunctival, cutaneous, dental (to a tooth or teeth), electro-osmosis, endocervical, endosinusial, endotracheal, extracorporeal, hemodialysis, infiltration, interstitial, intra-abdominal, intra-amniotic, intra-articular, intrabiliary, intrabronchial, intrabursal, intracartilaginous (within a cartilage), intracaudal (within the cauda equine), intracisternal (within the cisterna magna cerebellomedularis), intracorneal (within the cornea), dental intracornal, intracoronary (within the coronary arteries), intracorporus cavernosum (within the dilatable spaces of the corporus cavernosa of the penis), intradiscal (within a disc), intraductal (within a duct of a gland), intraduodenal (within the duodenum), intradural (within or beneath the dura), intraepidermal (to the epidermis), intraesophageal (to the esophagus), intragastric (within the stomach), intragingival (within the gingivae), intraileal (within the distal portion of the small intestine), intralesional (within or introduced directly to a localized lesion), intraluminal (within a lumen of a tube), intralymphatic (within the lymph), intramedullary (within the marrow cavity of a bone), intrameningeal (within the meninges), intramyocardial (within the myocardium), intraocular (within the eye), intraovarian (within the ovary), intrapericardial (within the pericardium), intrapleural (within the pleura), intraprostatic (within the prostate gland), intrapulmonary (within the lungs or its bronchi), intrasinal (within the nasal or periorbital sinuses), intraspinal (within the vertebral column), intrasynovial (within the synovial cavity of a joint), intratendinous (within a tendon), intratesticular (within the testicle), intrathecal (within the cerebrospinal fluid at any level of the cerebrospinal axis), intrathoracic (within the thorax), intratubular (within the tubules of an organ), intratumor (within a tumor), intratympanic (within the aurus media), intravascular (within a vessel or vessels), intraventricular (within a ventricle), iontophoresis (by means of electric current where ions of soluble salts migrate into the tissues of the body), irrigation (to bathe or flush open wounds or body cavities), laryngeal (directly upon the larynx), nasogastric (through the nose and into the stomach), occlusive dressing technique (topical route administration which is then covered by a dressing which occludes the area), ophthalmic (to the external eye), oropharyngeal (directly to the mouth and pharynx), parenteral, percutaneous, periarticular, peridural, perineural, periodontal, rectal, respiratory (within the respiratory tract by inhaling orally or nasally for local or systemic effect), retrobulbar (behind the pons or behind the eyeball), intramyocardial (entering the myocardium), soft tissue, subarachnoid, subconjunctival, submucosal, topical, transplacental (through or across the placenta), transtracheal (through the wall of the trachea), transtympanic (across or through the tympanic cavity), ureteral (to the ureter), urethral (to the urethra), vaginal, caudal block, diagnostic, nerve block, biliary perfusion, cardiac perfusion, photopheresis or spinal.

### III. PHARMACEUTICAL COMPOSTIONS AND FORMULATIONS

[1001] The present invention further provides pharmaceutical compositions comprising the DDs of the invention, one or more stimuli, effector modules and biocircuit systems comprising the same, and optionally at least one pharmaceutically acceptable excipient or inert ingredient.

[1002] As used herein the term “pharmaceutical composition” refers to a preparation of activate agents (e.g., DDs, ligands of the DDs, effector modules and biocircuits), other components, vectors, cells and described herein, or pharmaceutically acceptable salts thereof, optionally with other chemical components such as physiologically suitable carriers and excipients. The pharmaceutical compositions of the invention comprise an effective amount of one or more active compositions of the invention. The preparation of a pharmaceutical composition that contains at least one composition of the present invention and/or an additional active ingredient will be known to those skilled in the art in light of the present disclosure, as exemplified by Remington's Pharmaceutical Sciences, 18th Ed. Mack Printing Company, 1990, incorporated herein by reference.

[1003] The term “excipient” or “inert ingredient” refers to an inactive substance added to a pharmaceutical composition and formulation to further facilitate administration of an active ingredient. For the purposes of the present disclosure, the phrase “active ingredient” generally refers to any one or more biocircuits, effector modules, DDs, stimuli and payloads (i.e., immunotherapeutic agents), other components, vectors, and cells to be delivered as described herein. The phrases “pharmaceutically acceptable” refers to molecular entities and compositions that do not produce an adverse, allergic or other untoward reaction when administered to an animal, such as, for example, a human, as appropriate.

[1004] In some embodiments, pharmaceutical compositions and formulations are administered to humans, human patients or subjects. Although the descriptions of pharmaceutical compositions provided herein are principally directed to pharmaceutical compositions which are suitable for administration to humans, it will be understood by the skilled artisan that such compositions are generally suitable for administration to any other animal, e.g., to non-human animals, e.g. non-human mammals. Subjects to which administration of the pharmaceutical compositions is contemplated include, but are not limited to, non-human mammals, including agricultural animals such as cattle, horses, chickens and pigs, domestic animals such as cats, dogs, or research animals such as mice, rats, rabbits, dogs and non-human primates. It will be understood that, for human administration, preparations should meet sterility, pyrogenicity, general safety and purity standards as required by FDA Office of Biological Standards.

[1005] A pharmaceutical composition and formulation in accordance with the invention may be prepared, packaged, and/or sold in bulk, as a single unit dose, and/or as a plurality of single unit doses. As used herein, a “unit dose” is discrete amount of the pharmaceutical composition comprising a predetermined amount of the active ingredient. The amount of the active ingredient is generally equal to the dosage of the active ingredient which would be administered to a subject and/or a convenient fraction of such a dosage such as, for example, one-half or one-third of such a dosage.

[1006] The compositions of the present invention may be formulated in any manner suitable for delivery. The formulation may be, but is not limited to, nanoparticles, poly (lactic-co-glycolic acid) (PLGA) microspheres, lipidoids, lipoplex, liposome, polymers, carbohydrates (including simple sugars), cationic lipids and combinations thereof.

[1007] In one embodiment, the formulation is a nanoparticle which may comprise at least one lipid. The lipid may be selected from, but is not limited to, DLin-DMA, DLin-K-DMA, 98N12-5, C12-200, DLin-MC3-DMA, DLin-KC2-DMA, DODMA, PLGA, PEG, PEG-DMG and PEGylated lipids. In another aspect, the lipid may be a cationic lipid such as, but not limited to, DLin-DMA, DLin-D-DMA, DLin-MC3-DMA, DLin-KC2-DMA and DODMA.

[1008] For polynucleotides of the invention, the formulation may be selected from any of those taught, for example, in International Application PCT/US2012/069610, the contents of which are incorporated herein by reference in its entirety.

[1009] Relative amounts of the active ingredient, the pharmaceutically acceptable excipient or inert ingredient, and/or any additional ingredients in a pharmaceutical composition in accordance with the invention will vary, depending upon the identity, size, and/or condition of the subject treated and further depending upon the route by which the composition is to be administered. By way of example, the composition may comprise between 0.1% and 100%, e.g., between 0.5 and 50%, between 1-30%, between 5-80%, at least 80% (w/w) active ingredient.

[1010] Efficacy of treatment or amelioration of disease can be assessed, for example by measuring disease progression, disease remission, symptom severity, reduction in pain, quality of life, dose of a medication required to sustain a treatment effect, level of a disease marker or any other measurable parameter appropriate for a given disease being treated or targeted for prevention. It is well within the ability of one skilled in the art to monitor efficacy of treatment or prevention by measuring any one of such parameters, or any combination of parameters. In connection with the administration of compositions of the present invention, “effective against” for example a cancer, indicates that administration in a clinically appropriate manner results in a beneficial effect for at least a statistically significant fraction of patients, such as an improvement of symptoms, a cure, a reduction in disease load, reduction in tumor mass or cell numbers, extension of life, improvement in quality of life, or other effect generally recognized as positive by medical doctors familiar with treating the particular type of cancer.

[1011] A treatment or preventive effect is evident when there is a statistically significant improvement in one or more parameters of disease status, or by a failure to worsen or to develop symptoms where they would otherwise be anticipated. As an example, a favorable change of at least 10% in a measurable parameter of disease, and preferably at least 20%, 30%, 40%, 50% or more can be indicative of effective treatment. Efficacy for a given composition or formulation of the present invention can also be judged using an experimental animal model for the given disease as known in the art. When using an experimental animal model, efficacy of treatment is evidenced when a statistically significant change is observed.

[1012] In some embodiments, the polypeptides of the invention may be delivered to the cell directly. In one embodiment, the polypeptides of the invention may be delivered using synthetic peptides comprising an endosomal leakage domain (ELD) fused to a cell penetration domain (CLD). The polypeptides of the invention are co introduced into the cell with the ELD-CLD-synthetic peptide. ELDs facilitate the escape of proteins that are trapped in the endosome, into the cytosol. Such domains are derived proteins of microbial and viral origin and have been described in the art. CPDs allow the transport of proteins across the plasma membrane and have also been described in the art. The ELD-CLD fusion proteins synergistically increase the transduction efficiency when compared to the co-transduction with either domain alone. In some embodiments, a histidine rich domain may optionally be added to the shuttle construct as an additional method of allowing the escape of the cargo from the endosome into the cytosol. The shuttle may also include a cysteine residue at the N or C terminus to generate multimers of the fusion peptide. Multimers of the ELD-CLD fusion peptides generated by the addition of cysteine residue to the terminus of the peptide show even greater transduction efficiency when compared to the single fusion peptide constructs. The polypeptides of the invention may also be appended to appropriate localization signals to direct the cargo to the appropriate sub-cellular location e.g. nucleus. In some embodiments any of the ELDs, CLDs or the fusion ELD-CLD synthetic peptides taught in the International Patent Publication, WO2016161516 and WO2017175072 may be useful in the present invention (the contents of each of which are herein incorporated by reference in their entirety).

### Therapeutic Uses

### 1. Cancer

[1013] Various cancers may be treated with pharmaceutical compositions, biocircuits, biocircuit components, effector modules including their SREs or payloads of the present invention. As used herein, the term “cancer” refers to any of various malignant neoplasms characterized by the proliferation of anaplastic cells that tend to invade surrounding tissue and metastasize to new body sites and also refers to the pathological condition characterized by such malignant neoplastic growths. Cancers may be tumors or hematological malignancies, and include but are not limited to, all types of lymphomas/leukemias, carcinomas and sarcomas, such as those cancers or tumors found in the anus, bladder, bile duct, bone, brain, breast, cervix, colon/rectum, endometrium, esophagus, eye, gallbladder, head and neck, liver, kidney, larynx, lung, mediastinum (chest), mouth, ovaries, pancreas, penis, prostate, skin, small intestine, stomach, spinal marrow, tailbone, testicles, thyroid and uterus.

[1014] Types of carcinomas which may be treated with the compositions of the present invention include, but are not limited to, papilloma/carcinoma, choriocarcinoma, endodermal sinus tumor, teratoma, adenoma/adenocarcinoma, melanoma, fibroma, lipoma, leiomyoma, rhabdomyoma, mesothelioma, angioma, osteoma, chondroma, glioma, lymphoma/leukemia, squamous cell carcinoma, small cell carcinoma, large cell undifferentiated carcinomas, basal cell carcinoma and sinonasal undifferentiated carcinoma.

[1015] Types of carcinomas which may be treated with the compositions of the present invention include, but are not limited to, soft tissue sarcoma such as alveolar soft part sarcoma, angiosarcoma, dermatofibrosarcoma, desmoid tumor, desmoplastic small round cell tumor, extraskeletal chondrosarcoma, extraskeletal osteosarcoma, fibrosarcoma, hemangiopericytoma, hemangiosarcoma, Kaposi's sarcoma, leiomyosarcoma, liposarcoma, lymphangiosarcoma, lymphosarcoma, malignant fibrous histiocytoma, neurofibrosarcoma, rhabdomyosarcoma, synovial sarcoma, and Askin's tumor, Ewing's sarcoma (primitive neuroectodermal tumor), malignant hemangioendothelioma, malignant schwannoma, osteosarcoma, and chondrosarcoma.

[1016] As a non-limiting example, the carcinoma which may be treated may be Acute granulocytic leukemia, Acute lymphocytic leukemia, Acute myelogenous leukemia, Adenocarcinoma, Adenosarcoma, Adrenal cancer, Adrenocortical carcinoma, Anal cancer, Anaplastic astrocytoma, Angiosarcoma, Appendix cancer, Astrocytoma, Basal cell carcinoma, B-Cell lymphoma), Bile duct cancer, Bladder cancer, Bone cancer, Bowel cancer, Brain cancer, Brain stem glioma, Brain tumor, Breast cancer, Carcinoid tumors, Cervical cancer, Cholangiocarcinoma, Chondrosarcoma, Chronic lymphocytic leukemia, Chronic myelogenous leukemia, Colon cancer, Colorectal cancer, Craniopharyngioma, Cutaneous lymphoma, Cutaneous melanoma, Diffuse astrocytoma, Ductal carcinoma in situ, Endometrial cancer, Ependymoma, Epithelioid sarcoma, Esophageal cancer, Ewing sarcoma, Extrahepatic bile duct cancer, Eye cancer, Fallopian tube cancer, Fibrosarcoma, Gallbladder cancer, Gastric cancer, Gastrointestinal cancer, Gastrointestinal carcinoid cancer, Gastrointestinal stromal tumors, General, Germ cell tumor, Glioblastoma multiforme, Glioma, Hairy cell leukemia, Head and neck cancer, Hemangioendothelioma, Hodgkin lymphoma, Hodgkin's disease, Hodgkin's lymphoma, Hypopharyngeal cancer, Infiltrating ductal carcinoma, Infiltrating lobular carcinoma, Inflammatory breast cancer, Intestinal Cancer, Intrahepatic bile duct cancer, Invasive/infiltrating breast cancer, Islet cell cancer, Jaw cancer, Kaposi sarcoma, Kidney cancer, Laryngeal cancer, Leiomyosarcoma, Leptomeningeal metastases, Leukemia, Lip cancer, Liposarcoma, Liver cancer, Lobular carcinoma in situ, Low-grade astrocytoma, Lung cancer, Lymph node cancer, Lymphoma, Male breast cancer, Medullary carcinoma, Medulloblastoma, Melanoma, Meningioma, Merkel cell carcinoma, Mesenchymal chondrosarcoma, Mesenchymous, Mesothelioma, Metastatic breast cancer, Metastatic melanoma, Metastatic squamous neck cancer, Mixed gliomas, Mouth cancer, Mucinous carcinoma, Mucosal melanoma, Multiple myeloma, Nasal cavity cancer, Nasopharyngeal cancer, Neck cancer, Neuroblastoma, Neuroendocrine tumors, Non-Hodgkin lymphoma, Non-Hodgkin's lymphoma, Non-small cell lung cancer, Oat cell cancer, Ocular cancer, Ocular melanoma, Oligodendroglioma, Oral cancer, Oral cavity cancer, Oropharyngeal cancer, Osteogenic sarcoma, Osteosarcoma, Ovarian cancer, Ovarian epithelial cancer, Ovarian germ cell tumor, Ovarian primary peritoneal carcinoma, Ovarian sex cord stromal tumor, Paget's disease, Pancreatic cancer, Papillary carcinoma, Paranasal sinus cancer, Parathyroid cancer, Pelvic cancer, Penile cancer, Peripheral nerve cancer, Peritoneal cancer, Pharyngeal cancer, Pheochromocytoma, Pilocytic astrocytoma, Pineal region tumor, Pineoblastoma, Pituitary gland cancer, Primary central nervous system lymphoma, Prostate cancer, Rectal cancer, Renal cell cancer, Renal pelvis cancer, Rhabdomyosarcoma, Salivary gland cancer, Sarcoma, Sarcoma, bone, Sarcoma, soft tissue, Sarcoma, uterine, Sinus cancer, Skin cancer, Small cell lung cancer, Small intestine cancer, Soft tissue sarcoma, Spinal cancer, Spinal column cancer, Spinal cord cancer, Spinal tumor, Squamous cell carcinoma, Stomach cancer, Synovial sarcoma, T-cell lymphoma), Testicular cancer, Throat cancer, Thymoma/thymic carcinoma, Thyroid cancer, Tongue cancer, Tonsil cancer, Transitional cell cancer, Transitional cell cancer, Transitional cell cancer, Triple-negative breast cancer, Tubal cancer, Tubular carcinoma, Ureteral cancer, Ureteral cancer, Urethral cancer, Uterine adenocarcinoma, Uterine cancer, Uterine sarcoma, Vaginal cancer, and Vulvar cancer.

### 2. Combination Treatments

[1017] The invention further relates to the use of pharmaceutical compositions, biocircuits, biocircuit components, effector modules including their SREs or payloads of the present invention for treating one or more forms of cancer, in combination with other pharmaceuticals and/or other therapeutic methods, e.g., with known pharmaceuticals and/or known therapeutic methods, such as, for example, those which are currently employed for treating these disorders. For example, the pharmaceutical compositions, biocircuits, biocircuit components, effector modules including their SREs or payloads of the present invention can also be administered in conjunction with one or more additional anti-cancer treatments, such as biological, chemotherapy and radiotherapy. Accordingly, a treatment can include, for example, imatinib (Gleevac), all-trans-retinoic acid, a monoclonal antibody treatment (gemtuzumab, ozogamicin), chemotherapy (for example, chlorambucil, prednisone, prednisolone, vincristine, cytarabine, clofarabine, farnesyl transferase inhibitors, decitabine, inhibitors of MDR1), rituximab, interferon-α, anthracycline drugs (such as daunorubicin or idarubicin), L-asparaginase, doxorubicin, cyclophosphamide, doxorubicin, bleomycin, fludarabine, etoposide, pentostatin, or cladribine), bone marrow transplant, stem cell transplant, radiation therapy, anti-metabolite drugs (methotrexate and 6-mercaptopurine), or any of the antibodies taught herein such as those in Table 6 of the copending commonly owned U.S. Ser. No. 62/320,864 filed on Apr. 11, 2016 or in U.S. Provisional Application No. 62/466,596 filed Mar. 3, 2017 and the International Publication WO2017/180587, the contents of each of which are incorporated herein by reference in their entirety or combinations thereof.

3. Combinations with Radiation

[1018] Radiation therapy (also called radiotherapy, X-ray therapy, or irradiation) is the use of ionizing radiation to kill cancer cells and shrink tumors. Radiation therapy can be administered externally via external beam radiotherapy (EBRT) or internally via brachytherapy. The effects of radiation therapy are localized and confined to the region being treated. Radiation therapy may be used to treat almost every type of solid tumor, including cancers of the brain, breast, cervix, larynx, lung, pancreas, prostate, skin, stomach, uterus, or soft tissue sarcomas. Radiation is also used to treat leukemia and lymphoma.

4. Combination with Chemotherapy

[1019] Chemotherapy is the treatment of cancer with drugs that can destroy cancer cells. In current usage, the term “chemotherapy” usually refers to cytotoxic drugs which affect rapidly dividing cells in general, in contrast with targeted therapy. Chemotherapy drugs interfere with cell division in various possible ways, e.g. with the duplication of DNA or the separation of newly formed chromosomes. Most forms of chemotherapy target all rapidly dividing cells and are not specific to cancer cells, although some degree of specificity may come from the inability of many cancer cells to repair DNA damage, while normal cells generally can.

[1020] Most chemotherapy regimens are given in combination. Exemplary chemotherapeutic agents include, but are not limited to, 5-FU Enhancer, 9-AC, AG2037, AG3340, Aggrecanase Inhibitor, Aminoglutethimide, Amsacrine (m-AMSA), Asparaginase, Azacitidine, Batimastat (BB94), BAY 12-9566, BCH-4556, Bis-Naphtalimide, Busulfan, Capecitabine, Carboplatin, Carmustaine+Polifepr Osan, cdk4/cdk2 inhibitors, Chlorambucil, CI-994, Cisplatin, Cladribine, CS-682, Cytarabine HCl, D2163, Dactinomycin, Daunorubicin HCl, DepoCyt, Dexifosamide, Docetaxel, Dolastain, Doxifluridine, Doxorubicin, DX8951f, E 7070, EGFR, Epirubicin, Erythropoietin, Estramustine phosphate sodium, Etoposide (VP16-213), Farnesyl Transferase Inhibitor, FK 317, Flavopiridol, Floxuridine, Fludarabine, Fluorouracil (5-FU), Flutamide, Fragyline, Gemcitabine, Hexamethylmelamine (HMM), Hydroxyurea (hydroxycarbamide), Ifosfamide, Interferon Alfa-2a, Interferon Alfa-2b, Interleukin-2, Irinotecan, ISI 641, Krestin, Lemonal DP 2202, Leuprolide acetate (LHRH-releasing factor analogue), Levamisole, LiGLA (lithium-gamma linolenate), Lodine Seeds, Lometexol, Lomustine (CCNU), Marimistat, Mechlorethamine HCl (nitrogen mustard), Megestrol acetate, Meglamine GLA, Mercaptopurine, Mesna, Mitoguazone (methyl-GAG; methyl glyoxal bis-guanylhydrazone; MGBG), Mitotane (o.p′-DDD), Mitoxantrone, Mitoxantrone HCl, MMI 270, MMP, MTA/LY 231514, Octreotide, ODN 698, OK-432, Oral Platinum, Oral Taxoid, Paclitaxel (TAXOL®), PARP Inhibitors, PD 183805, Pentostatin (2′ deoxycoformycin), PKC 412, Plicamycin, Procarbazine HCl, PSC 833, Ralitrexed, RAS Farnesyl Transferase Inhibitor, RAS Oncogene Inhibitor, Semustine (methyl-CCNU), Streptozocin, Suramin, Tamoxifen citrate, Taxane Analog, Temozolomide, Teniposide (VM-26), Thioguanine, Thiotepa, Topotecan, Tyrosine Kinase, UFT (Tegafur/Uracil), Valrubicin, Vinblastine sulfate, Vindesine sulfate, VX-710, VX-853, YM 116, ZD 0101, ZD 0473/Anormed, ZD 1839, ZD 9331.

### 5. Immuno-Oncology and Cell Therapies

[1021] Recent progress in the field of cancer immunology has allowed the development of several approaches to help the immune system keep the cancer at bay. Such immunotherapy approaches include the targeting of cancer antigens through monoclonal antibodies or through adoptive transfer of ex vivo engineered T cells (e.g., which contain chimeric antigen receptors or engineered T cell receptors).

[1022] In some embodiments, pharmaceutical compositions, biocircuits, biocircuit components, effector modules including their SREs or payloads of the present invention may be used in the modulation or alteration or exploitation of the immune system to target one or more cancers. This approach may also be considered with other such biological approaches, e.g., immune response modifying therapies such as the administration of interferons, interleukins, colony-stimulating factors, other monoclonal antibodies, vaccines, gene therapy, and nonspecific immunomodulating agents are also envisioned as anti-cancer therapies to be combined with the pharmaceutical compositions, biocircuits, biocircuit components, effector modules including their SREs or payloads of the present invention.

[1023] Cancer immunotherapy refers to a diverse set of therapeutic strategies designed to induce the patient's own immune system to fight the cancer. In some embodiments, pharmaceutical compositions, biocircuits, biocircuit components, effector modules including their SREs or payloads of the present invention are designed as immune-oncology therapeutics.

### 6. Cell Therapies

[1024] There are several types of cellular immunotherapies, including tumor infiltrating lymphocyte (TIL) therapy, genetically engineered T cells bearing chimeric antigen receptors (CARs), and recombinant TCR technology.

[1025] According to the present invention, the biocircuits and systems may be used in the development and implementation of cell therapies such as adoptive cell therapy. The biocircuits, their components, effector modules and their SREs and payloads may be used in cell therapies to effect TCR removal −TCR gene disruption, TCR engineering, to regulate epitope tagged receptors, in APC platforms for stimulating T cells, as a tool to enhance ex vivo APC stimulation, to improve methods of T cell expansion, in ex vivo stimulation with antigen, in TCR/CAR combinations, in the manipulation or regulation of TILs, in allogeneic cell therapy, in combination T cell therapy with other treatment lines (e.g. radiation, cytokines), to encode engineered TCRs, or modified TCRs, or to enhance T cells other than TCRs (e.g by introducing cytokine genes, genes for the checkpoint inhibitors PD1, CTLA4).

[1026] In some embodiments, improved response rates are obtained in support of cell therapies.

[1027] Expansion and persistence of cell populations may be achieved through regulation or fine tuning of the payloads, e.g., the receptors or pathway components in T cells, NK cells or other immune-related cells. In some embodiments, biocircuits, their components, SREs or effector modules are designed to spatially and/or temporally control the expression of proteins which enhance T-cell or NK cell response. In some embodiments, biocircuits, their components, SREs or effector modules are designed to spatially and/or temporally control the expression of proteins which inhibit T-cell or NK cell response.

[1028] In some embodiments, biocircuits, their components, SREs or effector modules are designed to reshape the tumor microenvironment in order to extend utility of the biocircuit or a pharmaceutical composition beyond direct cell killing.

[1029] In some embodiments, biocircuits, their components, SREs or effector modules are designed to reduce, mitigate or eliminate the CAR cytokine storm. In some embodiments such reduction, mitigation and/or elimination occurs in solid tumors or tumor microenvironments.

[1030] In some embodiments the effector modules may encode one or more cytokines. In some embodiments, the cytokine is IL15. Effector modules encoding IL15 may be designed to induce proliferation in cytotoxic populations and avoid stimulation of T regs. In other cases, the effector modules which induce proliferation in cytotoxic populations may also stimulate NK and NKT cells.

[1031] In some embodiments, effector modules may encode, or be tuned or induced to produce, one or more cytokines for expansion of cells in the biocircuits of the invention. In such cases the cells may be tested for actual expansion. Expansion may be at least 5%, 10%, 20%, 30%, 40%, 50%, 60%, 70%, 80%, 90% or more.

[1032] In some embodiments, the tumor microenvironment may be remodeled using a biocircuit containing an effector module encoding IL17.

[1033] In some embodiments, biocircuits, their components, SREs or effector modules are designed to modulate Tregs to attenuate autoimmune disorders. In such a case, IL2 may be regulated using a singly tuned module or one having multiple tuned features as described herein.

[1034] In some embodiments, biocircuits, their components, SREs or effector modules are designed to be significantly less immunogenic than other biocircuits or switches in the art.

[1035] As used herein, “significantly less immunogenic” refers to a detectable decrease in immunogenicity. In another embodiment, the term refers to a fold decrease in immunogenicity. In another embodiment, the term refers to a decrease such that an effective amount of the biocircuits, their components, SREs or effector modules which can be administered without triggering a detectable immune response. In another embodiment, the term refers to a decrease such that the biocircuits, their components, SREs or effector modules can be repeatedly administered without eliciting an immune response. In another embodiment, the decrease is such that the biocircuits, their components, SREs or effector modules can be repeatedly administered without eliciting an immune response.

[1036] In another embodiment, the biocircuits, their components, SREs or effector modules is 2-fold less immunogenic than its unmodified counterpart or reference compound. In another embodiment, immunogenicity is reduced by a 3-fold factor. In another embodiment, immunogenicity is reduced by a 5-fold factor. In another embodiment, immunogenicity is reduced by a 7-fold factor. In another embodiment, immunogenicity is reduced by a 10-fold factor. In another embodiment, immunogenicity is reduced by a 15-fold factor. In another embodiment, immunogenicity is reduced by a fold factor. In another embodiment, immunogenicity is reduced by a 50-fold factor. In another embodiment, immunogenicity is reduced by a 100-fold factor. In another embodiment, immunogenicity is reduced by a 200-fold factor. In another embodiment, immunogenicity is reduced by a 500-fold factor. In another embodiment, immunogenicity is reduced by a 1000-fold factor. In another embodiment, immunogenicity is reduced by a 2000-fold factor. In another embodiment, immunogenicity is reduced by another fold difference.

[1037] Methods of determining immunogenicity are well known in the art, and include, e.g. measuring secretion of cytokines (e.g. IL12, IFNalpha, TNF-alpha, RANTES, MIP-1alpha or beta, IL6, IFN-beta, or IL8), measuring expression of DC activation markers (e.g. CD83, HLA-DR, CD80 and CD86), or measuring ability to act as an adjuvant for an adaptive immune response.

[1038] In one embodiment, the chimeric antigen receptor (CAR) of the present invention may be a conditionally active CAR. A wild type protein or domain thereof, such as those described herein may be used to generate a conditionally active biologic protein which are reversibly or irreversibly inactivated at the wild type normal physiological conditions as well as to such conditionally active biologic proteins and domains and uses of such conditional active biologic proteins and domains are provided. Such methods and conditionally active proteins are taught in, for example, International Publication No. WO2016033331, the contents of which are incorporated herein by reference in their entirety. As a non-limiting example, the CAR comprises at least one antigen specific targeting region evolved from a wild type protein or a domain thereof and one or more of a decrease in activity in the assay at the normal physiological condition compared to the antigen specific targeting region of the wild-type protein or a domain thereof, and an increase in activity in the assay under the aberrant condition compared to the antigen specific targeting region of the wild-type protein or a domain thereof.

### 7. Diseases and Toxins

[1039] Various infectious diseases may be treated with pharmaceutical compositions, biocircuits, biocircuit components, effector modules including their SREs or payloads of the present invention. As used herein, the term “infectious disease” refers to any disorders caused by organisms such as bacteria, viruses, fungi or parasites. As a non-limiting example, the infectious disease may be Acute bacterial rhinosinusitis, 14-day measles, Acne, Acrodermatitis chronica atrophicans (ACA)-(late skin manifestation of latent Lyme disease), Acute hemorrhagic conjunctivitis, Acute hemorrhagic cystitis, Acute rhinosinusitis, Adult T-cell Leukemia-Lymphoma (ATLL), African Sleeping Sickness, AIDS (Acquired Immunodeficiency Syndrome), Alveolar hydatid, Amebiasis, Amebic meningoencephalitis, Anaplasmosis, Anthrax, Arboviral or parainfectious, Ascariasis—(Roundworm infections), Aseptic meningitis, Athlete's foot (Tinea pedis), Australian tick typhus, Avian Influenza, Babesiosis, Bacillary angiomatosis, Bacterial meningitis, Bacterial vaginosis, Balanitis, Balantidiasis, Bang's disease, Barmah Forest virus infection, Bartonellosis (Verruga peruana; Carrion's disease; Oroya fever), Bat Lyssavirus Infection, Bay sore (Chiclero's ulcer), Baylisascaris infection (Racoon roundworm infection), Beaver fever, Beef tapeworm, Bejel (endemic syphilis), Biphasic meningoencephalitis, Black Bane, Black death, Black piedra, Blackwater Fever, Blastomycosis, Blennorrhea of the newborn, Blepharitis, Boils, Bornholm disease (pleurodynia), Borrelia miyamotoi Disease, Botulism, Boutonneuse fever, Brazilian purpuric fever, Break Bone fever, Brill, Bronchiolitis, Bronchitis, Brucellosis (Bang's disease), Bubonic plague, Bullous impetigo, Burkholderia mallei (Glanders), Burkholderia pseudomallei (Melioidosis), Buruli ulcers (also Mycoburuli ulcers), Busse, Busse-Buschke disease (Cryptococcosis), California group encephalitis, Campylobacteriosis, Candidiasis, Canefield fever (Canicola fever; 7-day fever; Weil's disease; leptospirosis; canefield fever), Canicola fever, Capillariasis, Carate, Carbapenem-resistant Enterobacteriaceae (CRE), Carbuncle, Carrion's disease, Cat Scratch fever, Cave disease, Central Asian hemorrhagic fever, Central European tick, Cervical cancer, Chagas disease, Chancroid (Soft chancre), Chicago disease, Chickenpox (Varicella), Chiclero's ulcer, Chikungunya fever, Chlamydial infection, Cholera, Chromoblastomycosis, Ciguatera, Clap, Clonorchiasis (Liver fluke infection), Clostridium Difficile Infection, Clostridium Perfringens (Epsilon Toxin), Coccidioidomycosis fungal infection (Valley fever; desert rheumatism), Coenurosis, Colorado tick fever, Condyloma accuminata, Condyloma accuminata (Warts), Condyloma lata, Congo fever, Congo hemorrhagic fever virus, Conjunctivitis, cowpox, Crabs, Crimean, Croup, Cryptococcosis, Cryptosporidiosis (Crypto), Cutaneous Larval Migrans, Cyclosporiasis, Cystic hydatid, Cysticercosis, Cystitis, Czechoslovak tick, D68 (EV-D68), Dacryocytitis, Dandy fever, Darling's Disease, Deer fly fever, Dengue fever (1, 2, 3 and 4), Desert rheumatism, Devil's grip, Diphasic milk fever, Diphtheria, Disseminated Intravascular Coagulation, Dog tapeworm, Donovanosis, Donovanosis (Granuloma inguinale), Dracontiasis, Dracunculosis, Duke's disease, Dum Dum Disease, Durand-Nicholas-Favre disease, Dwarf tapeworm, E. coli infection (E. coli), Eastern equine encephalitis, Ebola Hemorrhagic Fever (Ebola virus disease EVD), Ectothrix, Ehrlichiosis (Sennetsu fever), Encephalitis, Endemic Relapsing fever, Endemic syphilis, Endophthalmitis, Endothrix, Enterobiasis (Pinworm infection), Enterotoxin-B Poisoning (Staph Food Poisoning), Enterovirus Infection, Epidemic Keratoconjunctivitis, Epidemic Relapsing fever, Epidemic typhus, Epiglottitis, Erysipelis, Erysipeloid (Erysipelothricosis), Erythema chronicum migrans, Erythema infectiosum, Erythema marginatum, Erythema multiforme, Erythema nodosum, Erythema nodosum leprosum, Erythrasma, Espundia, Eumycotic mycetoma, European blastomycosis, Exanthem subitum (Sixth disease), Eyeworm, Far Eastern tick, Fascioliasis, Fievre boutonneuse (Tick typhus), Fifth Disease (erythema infectiosum), Filatow-Dukes' Disease (Scalded Skin Syndrome; Ritter's Disease), Fish tapeworm, Fitz-Hugh-Curtis syndrome—Perihepatitis, Flinders Island Spotted Fever, Flu (Influenza), Folliculitis, Four Corners Disease, Four Corners Disease (Human Pulmonary Syndrome (HPS)), Frambesia, Francis disease, Furunculosis, Gas gangrene, Gastroenteritis, Genital Herpes, Genital Warts, German measles, Gerstmann-Straussler-Scheinker (GSS), Giardiasis, Gilchrist's disease, Gingivitis, Gingivostomatitis, Glanders, Glandular fever (infectious mononucleosis), Gnathostomiasis, Gonococcal Infection (Gonorrhea), Gonorrhea, Granuloma inguinale (Donovanosis), Guinea Worm, Haemophilus Influenza disease, Hamburger disease, Hansen's disease—leprosy, Hantaan disease, Hantaan-Korean hemorrhagic fever, Hantavirus Pulmonary Syndrome, Hantavirus Pulmonary Syndrome (HPS), Hard chancre, Hard measles, Haverhill fever—Rat bite fever, Head and Body Lice, Heartland fever, Helicobacterosis, Hemolytic Uremic Syndrome (HUS), Hepatitis A, Hepatitis B, Hepatitis C, Hepatitis D, Hepatitis E, Herpangina, Herpes—genital, Herpes labialis, Herpes—neonatal, Hidradenitis, Histoplasmosis, Histoplasmosis infection (Histoplasmosis), His-Werner disease, HIV infection, Hookworm infections, Hordeola, Hordeola (Stye), HTLV, HTLV-associated myelopathy (HAM), Human granulocytic ehrlichiosis, Human monocytic ehrlichiosis, Human Papilloma virus (HPV), Human Pulmonary Syndrome, Hydatid cyst, Hydrophobia, Impetigo, Including congenital (German Measles), Inclusion conjunctivitis, Inclusion conjunctivitis—Swimming Pool conjunctivitis—Pannus, Infantile diarrhea, Infectious Mononucleosis, Infectious myocarditis, Infectious pericarditis, Influenza, Isosporiasis, Israeli spotted fever, Japanese Encephalitis, Jock itch, Jorge Lobo disease lobomycosis, Jungle yellow fever, Junin Argentinian hemorrhagic fever, Kala Azar, Kaposi's sarcoma, Keloidal blastomycosis, Keratoconjunctivitis, Kuru, Kyasanur forest disease, LaCrosse encephalitis, Lassa hemorrhagic fever, Legionellosis (Legionnaires Disease), Legionnaire's pneumonia, Lemierre's Syndrome (Postanginal septicemia), Lemming fever, Leprosy, Leptospirosis (Nanukayami fever; Weil's disease), Listeriosis (Listeria), Liver fluke infection, Lobo's mycosis, Lockjaw, Loiasis, Louping Ill, Ludwig's angina, Lung fluke infection, Lung fluke infection (Paragonimiasis), Lyme disease, Lymphogranuloma venereum infection (LGV), Machupo Bolivian hemorrhagic fever, Madura foot, Mal del pinto, Malaria, Malignant pustule, Malta fever, Marburg hemorrhagic fever, Masters disease, Maternal Sepsis (Puerperal fever), Measles, Mediterranean spotted fever, Melioidosis (Whitmore's disease), Meningitis, Meningococcal Disease, MERS, Milker's nodule, Molluscum contagiosum, Moniliasis, monkeypox, Mononucleosis, Mononucleosis-like syndrome, Montezuma's Revenge, Morbilli, MRSA (methicillin-resistant Staphylococcus aureus) infection, Mucormycosis—Zygomycosis, Multiple Organ Dysfunction Syndrome or MODS, Multiple-system atrophy (MSA), Mumps, Murine typhus, Murray Valley Encephalitis (MVE), Mycoburuli ulcers, Mycoburuli ulcers-Buruli ulcers, Mycotic vulvovaginitis, Myositis, Nanukayami fever, Necrotizing fasciitis, Necrotizing fasciitis—Type 1, Necrotizing fasciitis—Type 2, Negishi, New world spotted fever, Nocardiosis, Nongonococcal urethritis, Non-Polio (Non-Polio Enterovirus), Norovirus infection, North American blastomycosis, North Asian tick typhus, Norwalk virus infection, Norwegian itch, O'Hara disease, Omsk hemorrhagic fever, Onchoceriasis, Onychomycosis, Opisthorchiasis, Opthalmia neonatorium, Oral hairy leukoplakia, Orf, Oriental Sore, Oriental Spotted Fever, Ornithosis (Parrot fever; Psittacosis), Oroya fever, Otitis externa, Otitis media, Pannus, Paracoccidioidomycosis, Paragonimiasis, Paralytic Shellfish Poisoning (Paralytic Shellfish Poisoning), Paronychia (Whitlow), Parotitis, PCP pneumonia, Pediculosis, Peliosis hepatica, Pelvic Inflammatory Disease, Pertussis (also called Whooping cough), Phaeohyphomycosis, Pharyngoconjunctival fever, Piedra (White Piedra), Piedra (Black Piedra), Pigbel, Pink eye conjunctivitis, Pinta, Pinworm infection, Pitted Keratolysis, Pityriasis versicolor (Tinea versicolor), Plague; Bubonic, Pleurodynia, Pneumococcal Disease, Pneumocystosis, Pneumonia, Pneumonic (Plague), Polio or Poliomyelitis, Polycystic hydatid, Pontiac fever, Pork tapeworm, Posada-Wernicke disease, Postanginal septicemia, Powassan, Progressive multifocal leukencephalopathy, Progressive Rubella Panencephalitis, Prostatitis, Pseudomembranous colitis, Psittacosis, Puerperal fever, Pustular Rash diseases (Small pox), Pyelonephritis, Pylephlebitis, Q-Fever, Quinsy, Quintana fever (5-day fever), Rabbit fever, Rabies, Racoon roundworm infection, Rat bite fever, Rat tapeworm, Reiter Syndrome, Relapsing fever, Respiratory syncytial virus (RSV) infection, Rheumatic fever, Rhodotorulosis, Ricin Poisoning, Rickettsialpox, Rickettsiosis, Rift Valley Fever, Ringworm, Ritter's Disease, River Blindness, Rocky Mountain spotted fever, Rose Handler's disease (Sporotrichosis), Rose rash of infants, Roseola, Ross River fever, Rotavirus infection, Roundworm infections, Rubella, Rubeola, Russian spring, Salmonellosis gastroenteritis, San Joaquin Valley fever, Sao Paulo Encephalitis, Sao Paulo fever, SARS, Scabies Infestation (Scabies) (Norwegian itch), Scalded Skin Syndrome, Scarlet fever (Scarlatina), Schistosomiasis, Scombroid, Scrub typhus, Sennetsu fever, Sepsis (Septic shock), Severe Acute Respiratory Syndrome, Severe Acute Respiratory Syndrome (SARS), Shiga Toxigenic Escherichia coli (STEC/VTEC), Shigellosis gastroenteritis (Shigella), Shinbone fever, Shingles, Shipping fever, Siberian tick typhus, Sinusitis, Sixth disease, Slapped cheek disease, Sleeping sickness, Smallpox (Variola), Snail Fever, Soft chancre, Southern tick associated rash illness, Sparganosis, Spelunker's disease, Sporadic typhus, Sporotrichosis, Spotted fever, Spring, St. Louis encephalitis, Staphylococcal Food Poisoning, Staphylococcal Infection, Strep. throat, Streptococcal Disease, Streptococcal Toxic-Shock Syndrome, Strongyloiciasis, Stye, Subacute Sclerosing Panencephalitis, Subacute Sclerosing Panencephalitis (SSPE), Sudden Acute Respiratory Syndrome, Sudden Rash, Swimmer's ear, Swimmer's Itch, Swimming Pool conjunctivitis, Sylvatic yellow fever, Syphilis, Systemic Inflammatory Response Syndrome (SIRS), Tabes dorsalis (tertiary syphilis), Taeniasis, Taiga encephalitis, Tanner's disease, Tapeworm infections, Temporal lobe encephalitis, Temporal lobe encephalitis, tetani (Lock Jaw), Tetanus Infection, Threadworm infections, Thrush, Tick, Tick typhus, Tinea barbae, Tinea capitis, Tinea corporis, Tinea cruris, Tinea manuum, Tinea nigra, Tinea pedis, Tinea unguium, Tinea versicolor, Torulopsosis, Torulosis, Toxic Shock Syndrome, Toxoplasmosis, transmissible spongioform (CJD), Traveler's diarrhea, Trench fever 5, Trichinellosis, Trichomoniasis, Trichomycosis axillaris, Trichuriasis, Tropical Spastic Paraparesis (TSP), Trypanosomiasis, Tuberculosis (TB), Tuberculosis, Tularemia, Typhoid Fever, Typhus fever, Ulcus molle, Undulant fever, Urban yellow fever, Urethritis, Vaginitis, Vaginosis, Vancomycin Intermediate (VISA), Vancomycin Resistant (VRSA), Varicella, Venezuelan Equine encephalitis, Verruga peruana, Vibrio cholerae (Cholera), Vibriosis (Vibrio), Vincent's disease or Trench mouth, Viral conjunctivitis, Viral Meningitis, Viral meningoencephalitis, Viral rash, Visceral Larval Migrans, Vomito negro, Vulvovaginitis, Warts, Waterhouse, Weil's disease, West Nile Fever, Western equine encephalitis, Whipple's disease, Whipworm infection, White Piedra, Whitlow, Whitmore's disease, Winter diarrhea, Wolhynia fever, Wool sorters' disease, Yaws, Yellow Fever, Yersinosis, Yersinosis (Yersinia), Zahorsky's disease, Zika virus disease, Zoster, Zygomycosis, John Cunningham Virus (JCV), Human immunodeficiency virus (HIV), Influenza virus, Hepatitis B, Hepatitis C, Hepatitis D, Respiratory syncytial virus (RSV), Herpes simplex virus 1 and 2, Human Cytomegalovirus, Epstein-Barr virus, Varicella zoster virus, Coronaviruses, Poxviruses, Enterovirus 71, Rubella virus, Human papilloma virus, Streptococcus pneumoniae, Streptococcus viridans., Staphylococcus aureus (S. aureus), Methicillin-resistant Staphylococcus aureus (MRSA), Vancomycin-intermediate Staphylococcus aureus (VISA), Vancomycin-resistant Staphylococcus aureus (VRSA), Staphylococcus epidermidis (S. epidermidis), Clostridium Tetani, Bordetella pertussis, Bordetella paratussis, Mycobacterium, Francisella Tularensis, Toxoplasma gondii, Candida (C. albicans, C. glabrata, C. parapsilosis, C. tropicalis, C. krusei and C. lusitaniae) and/or any other infectious diseases, disorders or syndromes.

[1040] Various toxins may be treated with pharmaceutical compositions, biocircuits, biocircuit components, effector modules including their SREs or payloads of the present invention. Non-limited examples of toxins include Ricin, Bacillus anthracis, Shiga toxin and Shiga-like toxin, Botulinum toxins.

[1041] Various tropical diseases may be treated with pharmaceutical compositions, biocircuits, biocircuit components, effector modules including their SREs or payloads of the present invention. Non-limited examples of tropical diseases include Chikungunya fever, Dengue fever, Chagas disease, Rabies, Malaria, Ebola virus, Marburg virus, West Nile Virus, Yellow Fever, Japanese encephalitis virus, St. Louis encephalitis virus.

[1042] Various foodborne illnesses and gastroenteritis may be treated with pharmaceutical compositions, biocircuits, biocircuit components, effector modules including their SREs or payloads of the present invention. Non-limited examples of foodborne illnesses and gastroenteritis include Rotavirus, Norwalk virus (Norovirus), Campylobacter jejuni, Clostridium difficile, Entamoeba histolytica, Helicobacter pylori, Enterotoxin B of Staphylococcus aureus, Hepatitis A virus (HAV), Hepatitis E, Listeria monocytogenes, Salmonella, Clostridium perfringens, and Salmonella.

[1043] Various infectious agents may be treated with pharmaceutical compositions, biocircuits, biocircuit components, effector modules including their SREs or payloads of the present invention. Non-limited examples of infectious agents include adenoviruses, Anaplasma phagocytophilium, Ascaris lumbricoides, Bacillus anthracis, Bacillus cereus, Bacteroides sp, Barmah Forest virus, Bartonella bacilliformis, Bartonella henselae, Bartonella quintana, beta-toxin of Clostridium perfringens, Bordetella pertussis, Bordetella parapertussis, Borrelia burgdorferi, Borrelia miyamotoi, Borrelia recurrentis, Borrelia sp., Botulinum toxin, Brucella sp., Burkholderia pseudomallei, California encephalitis virus, Campylobacter, Candida albicans, chikungunya virus, Chlamydia psittaci, Chlamydia trachomatis, Clonorchis sinensis, Clostridium difficile bacteria, Clostridium tetani, Colorado tick fever virus, Corynebacterium diphtheriae, Corynebacterium minutissimum, Coxiella burnetii, coxsackie A, coxsackie B, Crimean-Congo hemorrhagic fever virus, cytomegalovirus, dengue virus, Eastern Equine encephalitis virus, Ebola viruses, echovirus, Ehrlichia chaffeensis., Ehrlichia equi., Ehrlichia sp., Entamoeba histolytica, Enterobacter sp., Enterococcus faecalis, Enterovirus 71, Epstein-Barr virus (EBV), Erysipelothrix rhusiopathiae, Escherichia coli, Flavivirus, Fusobacterium necrophorum, Gardnerella vaginalis, Group B streptococcus, Haemophilus aegyptius, Haemophilus ducreyi, Haemophilus influenzae, hantavirus, Helicobacter pylori, Hepatitis A, Hepatitis B, Hepatitis C, Hepatitis D, Hepatitis E, herpes simplex virus 1 and 2, human herpes virus 6, human herpes Virus 8, human immunodeficiency virus 1 and 2, human T-cell leukemia viruses I and II, influenza viruses (A, B, C), Jamestown Canyon virus, Japanese encephalitis antigenic, Japanese encephalitis virus, John Cunninham virus, juninvirus, Kaposi's Sarcoma-associated Herpes Virus (KSHV), Klebsiella granulomatis, Klebsiella sp., Kyasanur Forest Disease virus, La Crosse virus, Lassavirus, Legionella pneumophila, Leptospira interrogans, Listeria monocytogenes, lymphocytic choriomeningitis virus, lyssavirus, Machupovirus, Marburg virus, measles virus, MERS coronavirus (MERS-CoV), Micrococcus sedentarius, Mobiluncus sp., Molluscipoxvirus, Moraxella catarrhalis, Morbilli-Rubeola virus, Mumpsvirus, Mycobacterium leprae, Mycobacterium tuberculosis, Mycobacterium ulcerans, Mycoplasma genitalium, Mycoplasma sp, Nairovirus, Neisseria gonorrhoeae, Neisseria meningitidis, Nocardia, Norwalk virus, norovirus, Omsk hemorrhagic fever virus, papilloma virus, parainfluenza viruses 1-3, parapoxvirus, parvovirus B19, Peptostreptococccus sp., Plasmodium sp., polioviruses types I, II, and III, Proteus sp., Pseudomonas aeruginosa, Pseudomonas pseudomallei, Pseudomonas sp., rabies virus, respiratory syncytial virus, ricin toxin, Rickettsia australis, Rickettsia conori, Rickettsia honei, Rickettsia prowazekii, Ross River Virus, rotavirus, rubellavirus, Saint Louis encephalitis, Salmonella Typhi, Sarcoptes scabiei, SARS-associated coronavirus (SARS-CoV), Serratia sp., Shiga toxin and Shiga-like toxin, Shigella sp., Sin Nombre Virus, Snowshoe hare virus, Staphylococcus aureus, Staphylococcus epidermidis, Streptobacillus moniliformis, Streptococcus pneumoniae, Streptococcus agalactiae, Streptococcus agalactiae, Streptococcus group A-H, Streptococcus pneumoniae, Streptococcus pyogenes, Treponema pallidum subsp. Pallidum, Treponema pallidum var. carateum, Treponema pallidum var. endemicum, Tropheryma whippelii, Ureaplasma urealyticum, Varicella-Zoster virus, variola virus, Vibrio cholerae, West Nile virus, yellow fever virus, Yersinia enterocolitica, Yersinia pestis, and Zika virus.

[1044] Various rare diseases may be treated with pharmaceutical compositions, biocircuits, biocircuit components, effector modules including their SREs or payloads of the present invention. As used herein, the term “rare disease” refers to any disease that affects a small percentage of the population. As a non-limiting example, the rare disease may be Acrocephalosyndactylia, Acrodermatitis, Addison Disease, Adie Syndrome, Alagille Syndrome, Amylose, Amyotrophic Lateral Sclerosis, Angelman Syndrome, Angiolymphoid Hyperplasia with Eosinophilia, Arnold-Chiari Malformation, Arthritis, Juvenile Rheumatoid, Asperger Syndrome, Bardet-Biedl Syndrome, Barrett Esophagus, Beckwith-Wiedemann Syndrome, Behcet Syndrome, Bloom Syndrome, Bowen's Disease, Brachial Plexus Neuropathies, Brown-Sequard Syndrome, Budd-Chiari Syndrome, Burkitt Lymphoma, Carcinoma 256, Walker, Caroli Disease, Charcot-Marie-Tooth Disease, Chediak-Higashi Syndrome, Chiari-Frommel Syndrome, Chondrodysplasia Punctata, Colonic Pseudo-Obstruction, Colorectal Neoplasms, Hereditary Nonpolyposis, Craniofacial Dysostosis, Creutzfeldt-Jakob Syndrome, Crohn Disease, Cushing Syndrome, Cystic Fibrosis, Dandy-Walker Syndrome, De Lange Syndrome, Dementia, Vascular, Dermatitis Herpetiformis, DiGeorge Syndrome, Diffuse Cerebral Sclerosis of Schilder, Duane Retraction Syndrome, Dupuytren Contracture, Ebstein Anomaly, Eisenmenger Complex, Ellis-Van Creveld Syndrome, Encephalitis, Enchondromatosis, Epidermal Necrolysis, Toxic, Facial Hemiatrophy, Factor XII Deficiency, Fanconi Anemia, Felty's Syndrome, Fibrous Dysplasia, Polyostotic, Fox-Fordyce Disease, Friedreich Ataxia, Fusobacterium, Gardner Syndrome, Gaucher Disease, Gerstmann Syndrome, Giant Lymph Node Hyperplasia, Glycogen Storage Disease Type I, Glycogen Storage Disease Type II, Glycogen Storage Disease Type IV, Glycogen Storage Disease Type V, Glycogen Storage Disease Type VII, Goldenhar Syndrome, Guillain-Barre Syndrome, Hallermann's Syndrome, Hamartoma Syndrome, Multiple, Hartnup Disease, Hepatolenticular Degeneration, Hepatolenticular Degeneration, Hereditary Sensory and Motor Neuropathy, Hirschsprung Disease, Histiocytic Necrotizing Lymphadenitis, Histiocytosis, Langerhans-Cell, Hodgkin Disease, Horner Syndrome, Huntington Disease, Hyperaldosteronism, Hyperhidrosis, Hyperostosis, Diffuse Idiopathic Skeletal, Hypopituitarism, Inappropriate ADH Syndrome, Intestinal Polyps, Isaacs Syndrome, Kartagener Syndrome, Kearns-Sayre Syndrome, Klippel-Feil Syndrome, Klippel-Trenaunay-Weber Syndrome, Kluver-Bucy Syndrome, Korsakoff Syndrome, Lafora Disease, Lambert-Eaton Myasthenic Syndrome, Landau-Kleffner Syndrome, Langer-Giedion Syndrome, Leigh Disease, Lesch-Nyhan Syndrome, Leukodystrophy, Globoid Cell, Li-Fraumeni Syndrome, Long QT Syndrome, Machado-Joseph Disease, Mallory-Weiss Syndrome, Marek Disease, Marfan Syndrome, Meckel Diverticulum, Meige Syndrome, Melkersson-Rosenthal Syndrome, Meniere Disease, Mikulicz' Disease, Miller Fisher Syndrome, Mobius Syndrome, Moyamoya Disease, Mucocutaneous Lymph Node Syndrome, Mucopolysaccharidosis I, Mucopolysaccharidosis II, Mucopolysaccharidosis III, Mucopolysaccharidosis IV, Mucopolysaccharidosis VI, Multiple Endocrine Neoplasia Type 1, Munchausen Syndrome by Proxy, Muscular Atrophy, Spinal, Narcolepsy, Neuroaxonal Dystrophies, Neuromyelitis Optica, Neuronal Ceroid-Lipofuscinoses, Niemann-Pick Diseases, Noonan Syndrome, Optic Atrophies, Hereditary, Osteitis Deformans, Osteochondritis, Osteochondrodysplasias, Osteolysis, Essential, Paget Disease Extramammary, Paget's Disease, Mammary, Panniculitis, Nodular Nonsuppurative, Papillon-Lefevre Disease, Paralysis, Pelizaeus-Merzbacher Disease, Pemphigus, Benign Familial, Penile Induration, Pericarditis, Constrictive, Peroxisomal Disorders, Peutz-Jeghers Syndrome, Pick Disease of the Brain, Pierre Robin Syndrome, Pigmentation Disorders, Pityriasis Lichenoides, Polycystic Ovary Syndrome, Polyendocrinopathies, Autoimmune, Prader-Willi Syndrome, Pupil Disorders, Rett Syndrome, Reye Syndrome, Rubinstein-Taybi Syndrome, Sandhoff Disease, Sarcoma, Ewing's, Schnitzler Syndrome, Sjogren's Syndrome, Sjogren-Larsson Syndrome, Smith-Lemli-Opitz Syndrome, Spinal Muscular Atrophies of Childhood, Sturge-Weber Syndrome, Sweating, Gustatory, Takayasu Arteritis, Tangier Disease, Tay-Sachs Disease, Thromboangiitis Obliterans, Thyroiditis, Autoimmune, Tietze's Syndrome, Togaviridae Infections, Tolosa-Hunt Syndrome, Tourette Syndrome, Uveomeningoencephalitic Syndrome, Waardenburg's Syndrome, Wegener Granulomatosis, Weil Disease, Werner Syndrome, Williams Syndrome, Wilms Tumor, Wolff-Parkinson-White Syndrome, Wolfram Syndrome, Wolman Disease, Zellweger Syndrome, Zollinger-Ellison Syndrome, and von Willebrand Diseases.

[1045] Various autoimmune diseases and autoimmune-related diseases may be treated with pharmaceutical compositions, biocircuits, biocircuit components, effector modules including their SREs or payloads of the present invention. As used herein, the term “autoimmune disease” refers to a disease in which the body produces antibodies that attack its own tissues. As a non-limiting example, the autoimmune disease may be Acute Disseminated Encephalomyelitis (ADEM), Acute necrotizing hemorrhagic leukoencephalitis, Addison's disease, Agammaglobulinemia, Alopecia areata, Amyloidosis, Ankylosing spondylitis, Anti-GBM/Anti-TBM nephritis, Antiphospholipid syndrome (APS), Autoimmune angioedema, Autoimmune aplastic anemia, Autoimmune dysautonomia, Autoimmune hepatitis, Autoimmune hyperlipidemia, Autoimmune immunodeficiency, Autoimmune inner ear disease (AIED), Autoimmune myocarditis, Autoimmune oophoritis, Autoimmune pancreatitis, Autoimmune retinopathy, Autoimmune thrombocytopenic purpura (ATP), Autoimmune thyroid disease, Autoimmune urticaria, Axonal & neuronal neuropathies, Balo disease, Behcet's disease, Bullous pemphigoid, Cardiomyopathy, Castleman disease, Celiac disease, Chagas disease, Chronic fatigue syndrome, Chronic inflammatory demyelinating polyneuropathy (CIDP), Chronic recurrent multifocal ostomyelitis (CRMO), Churg-Strauss syndrome, Cicatricial pemphigoid/benign mucosal pemphigoid, Crohn's disease, Cogans syndrome, Cold agglutinin disease, Congenital heart block, Coxsackie myocarditis, CREST disease, Essential mixed cryoglobulinemia, Demyelinating neuropathies, Dermatitis herpetiformis, Dermatomyositis, Devic's disease (neuromyelitis optica), Discoid lupus, Dressler's syndrome, Endometriosis, Eosinophilic esophagitis, Eosinophilic fasciitis, Erythema nodosum, Experimental allergic encephalomyelitis, Evans syndrome, Fibromyalgia, Fibrosing alveolitis, Giant cell arteritis (temporal arteritis), Giant cell myocarditis, Glomerulonephritis, Goodpasture's syndrome, Granulomatosis with Polyangiitis (GPA) (formerly called Wegener's Granulomatosis), Graves' disease, Guillain-Barre syndrome, Hashimoto's encephalitis, Hashimoto's thyroiditis, Hemolytic anemia, Henoch-Schonlein purpura, Herpes gestationis, Hypogammaglobulinemia, Idiopathic thrombocytopenic purpura (ITP), IgA nephropathy, IgG4-related sclerosing disease, Immunoregulatory lipoproteins, Inclusion body myositis, Interstitial cystitis, Juvenile arthritis, Juvenile diabetes (Type 1 diabetes), Juvenile myositis, Kawasaki syndrome, Lambert-Eaton syndrome, Leukocytoclastic vasculitis, Lichen planus, Lichen sclerosus, Ligneous conjunctivitis, Linear IgA disease (LAD), Lupus (SLE), Lyme disease, chronic, Meniere's disease, Microscopic polyangiitis, Mixed connective tissue disease (MCTD), Mooren's ulcer, Mucha-Habermann disease, Multiple sclerosis, Myasthenia gravis, Myositis, Narcolepsy, Neuromyelitis optica (Devic's), Neutropenia, Ocular cicatricial pemphigoid, Optic neuritis, Palindromic rheumatism, PANDAS (Pediatric Autoimmune Neuropsychiatric Disorders Associated with Streptococcus), Paraneoplastic cerebellar degeneration, Paroxysmal nocturnal hemoglobinuria (PNH), Parry Romberg syndrome, Parsonnage-Turner syndrome, Pars planitis (peripheral uveitis), Pemphigus, Peripheral neuropathy, Perivenous encephalomyelitis, Pernicious anemia, POEMS syndrome, Polyarteritis nodosa, Type I, II, & III autoimmune polyglandular syndromes, Polymyalgia rheumatica, Polymyositis, Postmyocardial infarction syndrome, Postpericardiotomy syndrome, Progesterone dermatitis, Primary biliary cirrhosis, Primary sclerosing cholangitis, Psoriasis, Psoriatic arthritis, Idiopathic pulmonary fibrosis, Pyoderma gangrenosum, Pure red cell aplasia, Raynauds phenomenon, Reactive Arthritis, Reflex sympathetic dystrophy, Reiter's syndrome, Relapsing polychondritis, Restless legs syndrome, Retroperitoneal fibrosis, Rheumatic fever, Rheumatoid arthritis, Sarcoidosis, Schmidt syndrome, Scleritis, Scleroderma, Sjogren's syndrome, Sperm & testicular autoimmunity, Stiff person syndrome, Subacute bacterial endocarditis (SBE), Susac's syndrome, Sympathetic ophthalmia, Takayasu's arteritis, Temporal arteritis/Giant cell arteritis, Thrombocytopenic purpura (TTP), Tolosa-Hunt syndrome, Transverse myelitis, Ulcerative colitis, Undifferentiated connective tissue disease (UCTD), Uveitis, Vasculitis, Vesiculobullous dermatosis, Vitiligo, and Wegener's granulomatosis (now termed Granulomatosis with Polyangiitis (GPA).

[1046] Various kidney diseases may be treated with pharmaceutical compositions, biocircuits, biocircuit components, effector modules including their SREs or payloads of the present invention. As a non-limiting example, the kidney disease Abderhalden-Kaufmann-Lignac syndrome (Nephropathic Cystinosis), Abdominal Compartment Syndrome, Acute Kidney Failure/Acute Kidney Injury, Acute Lobar Nephronia, Acute Phosphate Nephropathy, Acute Tubular Necrosis, Adenine Phosphoribosyltransferase Deficiency, Adenovirus Nephritis, Alport Syndrome, Amyloidosis, ANCA Vasculitis Related to Endocarditis and Other Infections, Angiomyolipoma, Analgesic Nephropathy, Anorexia Nervosa and Kidney Disease, Angiotensin Antibodies and Focal Segmental Glomerulosclerosis, Antiphospholipid Syndrome, Anti-TNF-α Therapy-related Glomerulonephritis, APOL1 Mutations, Apparent Mineralocorticoid Excess Syndrome, Aristolochic Acid Nephropathy, Chinese Herbal Nephropathy, Balkan Endemic Nephropathy, Bartter Syndrome, Beeturia, β-Thalassemia Renal Disease, Bile Cast Nephropathy, BK Polyoma Virus Nephropathy in the Native Kidney, Bladder Rupture, Bladder Sphincter Dyssynergia, Bladder Tamponade, Border-Crossers' Nephropathy, Bourbon Virus and Acute Kidney Injury, Burnt Sugarcane Harvesting and Acute Renal Dysfunction, Byetta and Renal Failure, Clq Nephropathy, Cannabinoid Hyperemesis Acute Renal Failure, Cardiorenal syndrome, Carfilzomib-Indiced Renal Injury, CFHR5 nephropathy, Charcot-Marie-Tooth Disease with Glomerulopathy, Cherry Concentrate and Acute Kidney Injury, Cholesterol Emboli, Churg-Strauss syndrome, Chyluria, Colistin Nephrotoxicity, Collagenofibrotic Glomerulopathy, Collapsing Glomerulopathy, Collapsing Glomerulopathy Related to CMV, Congenital Nephrotic Syndrome, Conorenal syndrome (Mainzer-Saldino Syndrome or Saldino-Mainzer Disease), Contrast Nephropathy, Copper Sulpfate Intoxication, Cortical Necrosis, Crizotinib-related Acute Kidney Injury, Cryoglobuinemia, Crystalglobulin-Induced Nephropathy, Crystal-Induced Acute Kidney injury, Cystic Kidney Disease, Acquired, Cystinuria, Dasatinib-Induced Nephrotic-Range Proteinuria, Dense Deposit Disease (MPGN Type 2), Dent Disease (X-linked Recessive Nephrolithiasis), Dialysis Disequilibrium Syndrome, Diabetes and Diabetic Kidney Disease, Diabetes Insipidus, Dietary Supplements and Renal Failure, Drugs of Abuse and Kidney Disease, Duplicated Ureter, EAST syndrome, Ebola and the Kidney, Ectopic Kidney, Ectopic Ureter, Edema, Swelling, Erdheim-Chester Disease, Fabry's Disease, Familial Hypocalciuric Hypercalcemia, Fanconi Syndrome, Fraser syndrome, Fibronectin Glomerulopathy, Fibrillary Glomerulonephritis and Immunotactoid Glomerulopathy, Fraley syndrome, Focal Segmental Glomerulosclerosis, Focal Sclerosis, Focal Glomerulosclerosis, Galloway Mowat syndrome, Giant Cell (Temporal) Arteritis with Kidney Involvement, Gestational Hypertension, Gitelman Syndrome, Glomerular Diseases, Glomerular Tubular Reflux, Glycosuria, Goodpasture Syndrome, Hair Dye Ingestion and Acute Kidney Injury, Hantavirus Infection Podocytopathy, Hematuria (Blood in Urine), Hemolytic Uremic Syndrome (HUS), Atypical Hemolytic Uremic Syndrome (aHUS), Hemophagocytic Syndrome, Hemorrhagic Cystitis, Hemorrhagic Fever with Renal Syndrome (HFRS, Hantavirus Renal Disease, Korean Hemorrhagic Fever, Epidemic Hemorrhagic Fever, Nephropathis Epidemica), Hemosiderosis related to Paroxysmal Nocturnal Hemoglobinuria and Hemolytic Anemia, Hepatic Glomerulopathy, Hepatic Veno-Occlusive Disease, Sinusoidal Obstruction Syndrome, Hepatitis C-Associated Renal Disease, Hepatorenal Syndrome, Herbal Supplements and Kidney Disease, High Blood Pressure and Kidney Disease, HIV-Associated Nephropathy (HIVAN), Horseshoe Kidney (Renal Fusion), Hunner's Ulcer, Hyperaldosteronism, Hypercalcemia, Hyperkalemia, Hypermagnesemia, Hypernatremia, Hyperoxaluria, Hyperphosphatemia, Hypocalcemia, Hypokalemia, Hypokalemia-induced renal dysfunction, Hypokalemic Periodic Paralysis, Hypomagnesemia, Hyponatremia, Hypophosphatemia, IgA Nephropathy, IgG4 Nephropathy, Interstitial Cystitis, Painful Bladder Syndrome (Questionnaire), Interstitial Nephritis, Ivemark's syndrome, Ketamine-Associated Bladder Dysfunction, Kidney Stones, Nephrolithiasis, Kombucha Tea Toxicity, Lead Nephropathy and Lead-Related Nephrotoxicity, Leptospirosis Renal Disease, Light Chain Deposition Disease, Monoclonal Immunoglobulin Deposition Disease, Liddle Syndrome, Lightwood-Albright Syndrome, Lipoprotein Glomerulopathy, Lithium Nephrotoxicity, LMX1B Mutations Cause Hereditary FSGS, Loin Pain Hematuria, Lupus, Systemic Lupus Erythematosis, Lupus Kidney Disease, Lupus Nephritis, Lupus Nephritis with Antineutrophil Cytoplasmic Antibody Seropositivity, Lyme Disease-Associated Glomerulonephritis, Malarial Nephropathy, Malignancy-Associated Renal Disease, Malignant Hypertension, Malakoplakia, Meatal Stenosis, Medullary Cystic Kidney Disease, Medullary Sponge Kidney, Megaureter, Melamine Toxicity and the Kidney, Membranoproliferative Glomerulonephritis, Membranous Nephropathy, MesoAmerican Nephropathy, Metabolic Acidosis, Metabolic Alkalosis, Methotrexate-related Renal Failure, Microscopic Polyangiitis, Milk-alkalai syndrome, Minimal Change Disease, MDMA (Molly; Ecstacy; 3,4-Methylenedioxymethamphetamine) and Kidney Failure, Multicystic dysplastic kidney, Multiple Myeloma, Myeloproliferative Neoplasms and Glomerulopathy, Nail-patella Syndrome, Nephrocalcinosis, Nephrogenic Systemic Fibrosis, Nephroptosis (Floating Kidney, Renal Ptosis), Nephrotic Syndrome, Neurogenic Bladder, Nodular Glomerulosclerosis, Non-Gonococcal Urethritis, Nutcracker syndrome, Orofaciodigital Syndrome, Orotic Aciduria, Orthostatic Hypotension, Orthostatic Proteinuria, Osmotic Diuresis, Ovarian Hyperstimulation Syndrome, Page Kidney, Papillary Necrosis, Papillorenal Syndrome (Renal-Coloboma Syndrome, Isolated Renal Hypoplasia), Parvovirus B19 and the Kidney, The Peritoneal-Renal Syndrome, Posterior Urethral Valve, Post-infectious Glomerulonephritis, Post-streptococcal Glomerulonephritis, Polyarteritis Nodosa, Polycystic Kidney Disease, Posterior Urethral Valves, Preeclampsia, Propofol infusion syndrome, Proliferative Glomerulonephritis with Monoclonal IgG Deposits (Nasr Disease), Propolis (Honeybee Resin) Related Renal Failure, Proteinuria (Protein in Urine), Pseudohyperaldosteronism, Pseudohypobicarbonatemia, Pseudohypoparathyroidism, Pulmonary-Renal Syndrome, Pyelonephritis (Kidney Infection), Pyonephrosis, Radiation Nephropathy, Ranolazine and the Kidney, Refeeding syndrome, Reflux Nephropathy, Rapidly Progressive Glomerulonephritis, Renal Abscess, Peripnephric Abscess, Renal Agenesis, Renal Arcuate Vein Microthrombi-Associated Acute Kidney Injury, Renal Artery Aneurysm, Renal Artery Stenosis, Renal Cell Cancer, Renal Cyst, Renal Hypouricemia with Exercise-induced Acute Renal Failure, Renal Infarction, Renal Osteodystrophy, Renal Tubular Acidosis, Renin Secreting Tumors (Juxtaglomerular Cell Tumor), Reset Osmostat, Retrocaval Ureter, Retroperitoneal Fibrosis, Rhabdomyolysis, Rhabdomyolysis related to Bariatric surgery, Rheumatoid Arthritis-Associated Renal Disease, Sarcoidosis Renal Disease, Salt Wasting, Renal and Cerebral, Schistosomiasis and Glomerular Disease, Schimke immuno-osseous dysplasia, Scleroderma Renal Crisis, Serpentine Fibula-Polycystic Kidney Syndrome, Exner Syndrome, Sickle Cell Nephropathy, Silica Exposure and Chronic Kidney Disease, Sri Lankan Farmers' Kidney Disease, Sjogren's Syndrome and Renal Disease, Synthetic Cannabinoid Use and Acute Kidney Injury, Kidney Disease Following Hematopoietic Cell Transplantation, Kidney Disease Related to Stem Cell Transplantation, Thin Basement Membrane Disease, Benign Familial Hematuria, Trigonitis, Tuberculosis, Genitourinary, Tuberous Sclerosis, Tubular Dysgenesis, Immune Complex Tubulointerstitial Nephritis Due to Autoantibodies to the Proximal Tubule Brush Border, Tumor Lysis Syndrome, Uremia, Uremic Optic Neuropathy, Ureteritis Cystica, Ureterocele, Urethral Caruncle, Urethral Stricture, Urinary Incontinence, Urinary Tract Infection, Urinary Tract Obstruction, Vesicointestinal Fistula, Vesicoureteral Reflux, Volatile Anesthetics and Acute Kidney Injury, Von Hippel-Lindau Disease, Waldenstrom's Macroglobulinemic Glomerulonephritis, Warfarin-Related Nephropathy, Wasp Stings and Acute Kidney Injury, Wegener's Granulomatosis, Granulomatosis with Polyangiitis, West Nile Virus and Chronic Kidney Disease, and Wunderlich syndrome.

[1047] Various cardiovascular diseases may be treated with pharmaceutical compositions, biocircuits, biocircuit components, effector modules including their SREs or payloads of the present invention. As a non-limiting example, the cardiovascular disease may be Ischemic heart disease also known as coronary artery disease, Cerebrovascular disease (Stroke), Peripheral vascular disease, Heart failure, Rheumatic heart disease, and Congenital heart disease.

[1048] Various antibody deficiencies may be treated with pharmaceutical compositions, biocircuits, biocircuit components, effector modules including their SREs or payloads of the present invention. As a non-limiting example, the antibody deficiencies may be X-Linked Agammaglobulinemia (XLA), Autosomal Recessive Agammaglobulinemia (ARA), Common Variable Immune Deficiency (CVID), IgG (IgG1, IgG2, IgG3 and IgG4) Subclass Deficiency, Selective IgA Deficiency, Specific Antibody Deficiency (SAD), Transient Hypogammaglobulinemia of Infancy, Antibody Deficiency with Normal or Elevated Immunoglobulins, Selective IgM Deficiency, Immunodeficiency with Thymoma (Good's Syndrome), Transcobalamin II Deficiency, Warts, Hypogammaglobulinemia, Infection, Myelokathexis (WHIM) Syndrome, Drug-Induced Antibody Deficiency, Kappa Chain Deficiency, Heavy Chain Deficiencies, Post-Meiotic Segregation (PMS2) Disorder, and Unspecified Hypogammaglobulinemia.

[1049] Various ocular diseases may be treated with pharmaceutical compositions, biocircuits, biocircuit components, effector modules including their SREs or payloads of the present invention. As a non-limiting example, the ocular disease may be thyroid eye disease (TED), Graves' disease (GD) and orbitopathy, Retina Degeneration, Cataract, optic atrophy, macular degeneration, Leber congenital amaurosis, retinal degeneration, cone-rod dystrophy, Usher syndrome, leopard syndrome, photophobia, and photoaversion.

[1050] Various neurological diseases may be treated with pharmaceutical compositions, biocircuits, biocircuit components, effector modules including their SREs or payloads of the present invention. As a non-limiting example, the neurological disease may be Absence of the Septum Pellucidum, Acid Lipase Disease, Acid Maltase Deficiency, Acquired Epileptiform Aphasia, Acute Disseminated Encephalomyelitis, Attention Deficit-Hyperactivity Disorder (ADHD), Adie's Pupil, Adie's Syndrome, Adrenoleukodystrophy, Agenesis of the Corpus Callosum, Agnosia, Aicardi Syndrome, Aicardi-Goutieres Syndrome Disorder, AIDS—Neurological Complications, Alexander Disease, Alpers' Disease, Alternating Hemiplegia, Alzheimer's Disease, Amyotrophic Lateral Sclerosis (ALS), Anencephaly, Aneurysm, Angelman Syndrome, Angiomatosis, Anoxia, Antiphospholipid Syndrome, Aphasia, Apraxia, Arachnoid Cysts, Arachnoiditis, Arnold-Chiari Malformation, Arteriovenous Malformation, Asperger Syndrome, Ataxia, Ataxia Telangiectasia, Ataxias and Cerebellar or Spinocerebellar Degeneration, Atrial Fibrillation and Stroke, Attention Deficit-Hyperactivity Disorder, Autism Spectrum Disorder, Autonomic Dysfunction, Back Pain, Barth Syndrome, Batten Disease, Becker's Myotonia, Behcet's Disease, Bell's Palsy, Benign Essential Blepharospasm, Benign Focal Amyotrophy, Benign Intracranial Hypertension, Bernhardt-Roth Syndrome, Binswanger's Disease, Blepharospasm, Bloch-Sulzberger Syndrome, Brachial Plexus Birth Injuries, Brachial Plexus Injuries, Bradbury-Eggleston Syndrome, Brain and Spinal Tumors, Brain Aneurysm, Brain Injury, Brown-Sequard Syndrome, Bulbospinal Muscular Atrophy, Cerebral Autosomal Dominant Arteriopathy with Sub-cortical Infarcts and Leukoencephalopathy (CADASIL), Canavan Disease, Carpal Tunnel Syndrome, Causalgia, Cavernomas, Cavernous Angioma, Cavernous Malformation, Central Cervical Cord Syndrome, Central Cord Syndrome, Central Pain Syndrome, Central Pontine Myelinolysis, Cephalic Disorders, Ceramidase Deficiency, Cerebellar Degeneration, Cerebellar Hypoplasia, Cerebral Aneurysms, Cerebral Arteriosclerosis, Cerebral Atrophy, Cerebral Beriberi, Cerebral Cavernous Malformation, Cerebral Gigantism, Cerebral Hypoxia, Cerebral Palsy, Cerebro-Oculo-Facio-Skeletal Syndrome (COFS), Charcot-Marie-Tooth Disease, Chiari Malformation, Cholesterol Ester Storage Disease, Chorea, Choreoacanthocytosis, Chronic Inflammatory Demyelinating Polyneuropathy (CIDP), Chronic Orthostatic Intolerance, Chronic Pain, Cockayne Syndrome Type II, Coffin Lowry Syndrome, Colpocephaly, Coma, Complex Regional Pain Syndrome, Congenital Facial Diplegia, Congenital Myasthenia, Congenital Myopathy, Congenital Vascular Cavernous Malformations, Corticobasal Degeneration, Cranial Arteritis, Craniosynostosis, Cree encephalitis, Creutzfeldt-Jakob Disease, Cumulative Trauma Disorders, Cushing's Syndrome, Cytomegalic Inclusion Body Disease, Cytomegalovirus Infection, Dancing Eyes-Dancing Feet Syndrome, Dandy-Walker Syndrome, Dawson Disease, De Morsier's Syndrome, Dejerine-Klumpke Palsy, Dementia, Dementia—Multi-Infarct, Dementia—Semantic, Dementia—Subcortical, Dementia With Lewy Bodies, Dentate Cerebellar Ataxia, Dentatorubral Atrophy, Dermatomyositis, Developmental Dyspraxia, Devic's Syndrome, Diabetic Neuropathy, Diffuse Sclerosis, Dravet Syndrome, Dysautonomia, Dysgraphia, Dyslexia, Dysphagia, Dyspraxia, Dyssynergia Cerebellaris Myoclonica, Dyssynergia Cerebellaris Progressiva, Dystonias, Early Infantile Epileptic Encephalopathy, Empty Sella Syndrome, Encephalitis, Encephalitis Lethargica, Encephaloceles, Encephalopathy, Encephalopathy (familial infantile), Encephalotrigeminal Angiomatosis, Epilepsy, Epileptic Hemiplegia, Erb's Palsy, Erb-Duchenne and Dejerine-Klumpke Palsies, Essential Tremor, Extrapontine Myelinolysis, Fabry Disease, Fahr's Syndrome, Fainting, Familial Dysautonomia, Familial Hemangioma, Familial Idiopathic Basal Ganglia Calcification, Familial Periodic Paralyses, Familial Spastic Paralysis, Farber's Disease, Febrile Seizures, Fibromuscular Dysplasia, Fisher Syndrome, Floppy Infant Syndrome, Foot Drop, Friedreich's Ataxia, Frontotemporal Dementia, Gaucher Disease, Generalized Gangliosidoses, Gerstmann's Syndrome, Gerstmann-Straussler-Scheinker Disease, Giant Axonal Neuropathy, Giant Cell Arteritis, Giant Cell Inclusion Disease, Globoid Cell Leukodystrophy, Glossopharyngeal Neuralgia, Glycogen Storage Disease, Guillain-Barre Syndrome, Hallervorden-Spatz Disease, Head Injury, Headache, Hemicrania Continua, Hemifacial Spasm, Hemiplegia Alterans, Hereditary Neuropathies, Hereditary Spastic Paraplegia, Heredopathia Atactica Polyneuritiformis, Herpes Zoster, Herpes Zoster Oticus, Hirayama Syndrome, Holmes-Adie syndrome, Holoprosencephaly, HTLV-1 Associated Myelopathy, Hughes Syndrome, Huntington's Disease, Hydranencephaly, Hydrocephalus, Hydrocephalus—Normal Pressure, Hydromyelia, Hypercortisolism, Hypersomnia, Hypertonia, Hypotonia, Hypoxia, Immune-Mediated Encephalomyelitis, Inclusion Body Myositis, Incontinentia Pigmenti, Infantile Hypotonia, Infantile Neuroaxonal Dystrophy, Infantile Phytanic Acid Storage Disease, Infantile Refsum Disease, Infantile Spasms, Inflammatory Myopathies, Iniencephaly, Intestinal Lipodystrophy, Intracranial Cysts, Intracranial Hypertension, Isaacs' Syndrome, Joubert Syndrome, Kearns-Sayre Syndrome, Kennedy's Disease, Kinsbourne syndrome, Kleine-Levin Syndrome, Klippel-Feil Syndrome, Klippel-Trenaunay Syndrome (KTS), Klüver-Bucy Syndrome, Korsakoff s Amnesic Syndrome, Krabbe Disease, Kugelberg-Welander Disease, Kuru, Lambert-Eaton Myasthenic Syndrome, Landau-Kleffner Syndrome, Lateral Femoral Cutaneous Nerve Entrapment, Lateral Medullary Syndrome, Learning Disabilities, Leigh's Disease, Lennox-Gastaut Syndrome, Lesch-Nyhan Syndrome, Leukodystrophy, Levine-Critchley Syndrome, Lewy Body Dementia, Lipid Storage Diseases, Lipoid Proteinosis, Lissencephaly, Locked-In Syndrome, Lou Gehrig's Disease, Lupus—Neurological Sequelae, Lyme Disease—Neurological Complications, Machado-Joseph Disease, Macrencephaly, Megalencephaly, Melkersson-Rosenthal Syndrome, Meningitis, Meningitis and Encephalitis, Menkes Disease, Meralgia Paresthetica, Metachromatic Leukodystrophy, Microcephaly, Migraine, Miller Fisher Syndrome, Mini Stroke, Mitochondrial Myopathy, Moebius Syndrome, Monomelic Amyotrophy, Motor Neuron Diseases, Moyamoya Disease, Mucolipidoses, Mucopolysaccharidosis, Multi-Infarct Dementia, Multifocal Motor Neuropathy, Multiple Sclerosis, Multiple System Atrophy, Multiple System Atrophy with Orthostatic Hypotension, Muscular Dystrophy, Myasthenia—Congenital, Myasthenia Gravis, Myelinoclastic Diffuse Sclerosis, Myoclonic Encephalopathy of Infants, Myoclonus, Myopathy, Myopathy—Congenital, Myopathy—Thyrotoxic, Myotonia, Myotonia Congenita, Narcolepsy, Neuroacanthocytosis, Neurodegeneration with Brain Iron Accumulation, Neurofibromatosis, Neuroleptic Malignant Syndrome, Neurological Complications of AIDS, Neurological Complications of Lyme Disease, Neurological Consequences of Cytomegalovirus Infection, Neurological Manifestations of Pompe Disease, Neurological Sequelae Of Lupus, Neuromyelitis Optica, Neuromyotonia, Neuronal Ceroid Lipofuscinosis, Neuronal Migration Disorders, Neuropathy—Hereditary, Neurosarcoidosis, Neurosyphilis, Neurotoxicity, Nevus Cavernosus, Niemann-Pick Disease, O'Sullivan-McLeod Syndrome, Occipital Neuralgia, Ohtahara Syndrome, Olivopontocerebellar Atrophy, Opsoclonus Myoclonus, Orthostatic Hypotension, Overuse Syndrome, Pain—Chronic, Pantothenate Kinase-Associated Neurodegeneration, Paraneoplastic Syndromes, Paresthesia, Parkinson's Disease, Paroxysmal Choreoathetosis, Paroxysmal Hemicrania, Parry-Romberg, Pelizaeus-Merzbacher Disease, Pena Shokeir II Syndrome, Perineural Cysts, Periodic Paralyses, Peripheral Neuropathy, Periventricular Leukomalacia, Persistent Vegetative State, Pervasive Developmental Disorders, Phytanic Acid Storage Disease, Pick's Disease, Pinched Nerve, Piriformis Syndrome, Pituitary Tumors, Polymyositis, Pompe Disease, Porencephaly, Post-Polio Syndrome, Postherpetic Neuralgia, Post infectious Encephalomyelitis, Postural Hypotension, Postural Orthostatic Tachycardia Syndrome, Postural Tachycardia Syndrome, Primary Dentatum Atrophy, Primary Lateral Sclerosis, Primary Progressive Aphasia, Prion Diseases, Progressive Hemifacial Atrophy, Progressive Locomotor Ataxia, Progressive Multifocal Leukoencephalopathy, Progressive Sclerosing Poliodystrophy, Progressive Supranuclear Palsy, Prosopagnosia, Pseudo-Torch syndrome, Pseudotoxoplasmosis syndrome, Pseudotumor Cerebri, Psychogenic Movement, Ramsay Hunt Syndrome I, Ramsay Hunt Syndrome II, Rasmussen's Encephalitis, Reflex Sympathetic Dystrophy Syndrome, Refsum Disease, Refsum Disease—Infantile, Repetitive Motion Disorders, Repetitive Stress Injuries, Restless Legs Syndrome, Retrovirus-Associated Myelopathy, Rett Syndrome, Reye's Syndrome, Rheumatic Encephalitis, Riley-Day Syndrome, Sacral Nerve Root Cysts, Saint Vitus Dance, Salivary Gland Disease, Sandhoff Disease, Schilder's Disease, Schizencephaly, Seitelberger Disease, Seizure Disorder, Semantic Dementia, Septo-Optic Dysplasia, Severe Myoclonic Epilepsy of Infancy (SMEI), Shaken Baby Syndrome, Shingles, Shy-Drager Syndrome, SjOgren's Syndrome, Sleep Apnea, Sleeping Sickness, Sotos Syndrome, Spasticity, Spina Bifida, Spinal Cord Infarction, Spinal Cord Injury, Spinal Cord Tumors, Spinal Muscular Atrophy, Spinocerebellar Atrophy, Spinocerebellar Degeneration, Steele-Richardson-Olszewski Syndrome, Stiff-Person Syndrome, Striatonigral Degeneration, Stroke, Sturge-Weber Syndrome, Subacute Sclerosing Panencephalitis, Subcortical Arteriosclerotic Encephalopathy, Short-lasting, Unilateral, Neuralgiform (SUNCT) Headache, Swallowing Disorders, Sydenham Chorea, Syncope, Syphilitic Spinal Sclerosis, Syringohydromyelia, Syringomyelia, Systemic Lupus Erythematosus, Tabes Dorsalis, Tardive Dyskinesia, Tarlov Cysts, Tay-Sachs Disease, Temporal Arteritis, Tethered Spinal Cord Syndrome, Thomsen's Myotonia, Thoracic Outlet Syndrome, Thyrotoxic Myopathy, Tic Douloureux, Todd's Paralysis, Tourette Syndrome, Transient Ischemic Attack, Transmissible Spongiform Encephalopathies, Transverse Myelitis, Traumatic Brain Injury, Tremor, Trigeminal Neuralgia, Tropical Spastic Paraparesis, Troyer Syndrome, Tuberous Sclerosis, Vascular Erectile Tumor, Vasculitis Syndromes of the Central and Peripheral Nervous Systems, Von Economo's Disease, Von Hippel-Lindau Disease (VHL), Von Recklinghausen's Disease, Wallenberg's Syndrome, Werdnig-Hoffman Disease, Wernicke-Korsakoff Syndrome, West Syndrome, Whiplash, Whipple's Disease, Williams Syndrome, Wilson Disease, Wolman's Disease, X-Linked Spinal and Bulbar Muscular Atrophy.

[1051] Various psychological disorders may be treated with pharmaceutical compositions, biocircuits, biocircuit components, effector modules including their SREs or payloads of the present invention. As a non-limiting example, the psychological disorders may be Aboulia, Absence epilepsy, Acute stress Disorder, Adjustment Disorders, Adverse effects of medication NOS, Age related cognitive decline, Agoraphobia, Alcohol Addiction, Alzheimer's Disease, Amnesia (also known as Amnestic Disorder), Amphetamine Addiction, Anorexia Nervosa, Anterograde amnesia, Antisocial personality disorder (also known as Sociopathy), Anxiety Disorder (Also known as Generalized Anxiety Disorder), Anxiolytic related disorders, Asperger's Syndrome (now part of Autism Spectrum Disorder), Attention Deficit Disorder (Also known as ADD), Attention Deficit Hyperactivity Disorder (Also known as ADHD), Autism Spectrum Disorder (also known as Autism), Autophagia, Avoidant Personality Disorder, Barbiturate related disorders, Benzodiazepine related disorders, Bereavement, Bibliomania, Binge Eating Disorder, Bipolar disorder (also known as Manic Depression, includes Bipolar I and Bipolar II), Body Dysmorphic Disorder, Borderline intellectual functioning, Borderline Personality Disorder, Breathing-Related Sleep Disorder, Brief Psychotic Disorder, Bruxism, Bulimia Nervosa, Caffeine Addiction, Cannabis Addiction, Catatonic disorder, Catatonic schizophrenia, Childhood amnesia, Childhood Disintegrative Disorder (now part of Autism Spectrum Disorder), Childhood Onset Fluency Disorder (formerly known as Stuttering), Circadian Rhythm Disorders, Claustrophobia, Cocaine related disorders, Communication disorder, Conduct Disorder, Conversion Disorder, Cotard delusion, Cyclothymia (also known as Cyclothymic Disorder), Delerium, Delusional Disorder, dementia, Dependent Personality Disorder (also known as Asthenic Personality Disorder), Depersonalization disorder (now known as Depersonalization/Derealization Disorder), Depression (also known as Major Depressive Disorder), Depressive personality disorder, Derealization disorder (now known as Depersonalization/Derealization Disorder), Dermotillomania, Desynchronosis, Developmental coordination disorder, Diogenes Syndrome, Disorder of written expression, Dispareunia, Dissocial Personality Disorder, Dissociative Amnesia, Dissociative Fugue, Dissociative Identity Disorder (formerly known as Multiple Personality Disorder), Down syndrome, Dyslexia, Dyspareunia, Dysthymia (now known as Persistent Depressive Disorder), Eating disorder NOS, Ekbom's Syndrome (Delusional Parasitosis), Emotionally unstable personality disorder, Encopresis, Enuresis (bedwetting), Erotomania, Exhibitionistic Disorder, Expressive language disorder, Factitious Disorder, Female Sexual Disorders, Fetishistic Disorder, Folie à deux, Fregoli delusion, Frotteuristic Disorder, Fugue State, Ganser syndrome, Gambling Addiction, Gender Dysphoria (formerly known as Gender Identity Disorder), Generalized Anxiety Disorder, General adaptation syndrome, Grandiose delusions, Hallucinogen Addiction, Haltlose personality disorder, Histrionic Personality Disorder, Primary hypersomnia, Huntington's Disease, Hypoactive sexual desire disorder, Hypochondriasis, Hypomania, Hyperkinetic syndrome, Hypersomnia, Hysteria, Impulse control disorder, Impulse control disorder NOS, Inhalant Addiction, Insomnia, Intellectual Development Disorder, Intermittent Explosive Disorder, Joubert syndrome, Kleptomania, Korsakoff's syndrome, Lacunar amnesia, Language Disorder, Learning Disorders, Major Depression (also known as Major Depressive Disorder), major depressive disorder, Male Sexual Disorders, Malingering, Mathematics disorder, Medication-related disorder, Melancholia, Mental Retardation (now known as Intellectual Development Disorder), Misophonia, Morbid jealousy, Multiple Personality Disorder (now known as Dissociative Identity Disorder), Munchausen Syndrome, Munchausen by Proxy, Narcissistic Personality Disorder, Narcolepsy, Neglect of child, Neurocognitive Disorder (formerly known as Dementia), Neuroleptic-related disorder, Nightmare Disorder, Non Rapid Eye Movement, Obsessive-Compulsive Disorder, Obsessive-Compulsive Personality Disorder (also known as Anankastic Personality Disorder), Oneirophrenia, Onychophagia, Opioid Addiction, Oppositional Defiant Disorder, Orthorexia (ON), Pain disorder, Panic attacks, Panic Disorder, Paranoid Personality Disorder, Parkinson's Disease, Partner relational problem, Passive-aggressive personality disorder, Pathological gambling, Pedophilic Disorder, Perfectionism, Persecutory delusion, Persistent Depressive Disorder (also known as Dysthymia), Personality change due to a general medical condition, Personality disorder, Pervasive developmental disorder (PDD), Phencyclidine related disorder, Phobic disorder, Phonological disorder, Physical abuse, Pica, Polysubstance related disorder, Postpartum Depression, Post-traumatic embitterment disorder (PTED), Post-Traumatic Stress Disorder, Premature ejaculation, Premenstrual Dysphoric Disorder, Psychogenic amnesia, Psychological factor affecting medical condition, Psychoneurotic personality disorder, Psychotic disorder, not otherwise specified, Pyromania, Reactive Attachment Disorder, Reading disorder, Recurrent brief depression, Relational disorder, REM Sleep Behavior Disorder, Restless Leg Syndrome, Retrograde amnesia, Retts Disorder (now part of Autism Spectrum Disorder), Rumination syndrome, Sadistic personality disorder, Schizoaffective Disorder, Schizoid Personality Disorder, Schizophrenia, Schizophreniform disorder, Schizotypal Personality Disorder, Seasonal Affective Disorder, Sedative, Hypnotic, or Anxiolytic Addiction, Selective Mutism, Self-defeating personality disorder, Separation Anxiety Disorder, Sexual Disorders Female, Sexual Disorders Male, Sexual Addiction, Sexual Masochism Disorder, Sexual Sadism Disorder, Shared Psychotic Disorder, Sleep Arousal Disorders, Sleep Paralysis, Sleep Terror Disorder (now part of Nightmare Disorder, Social Anxiety Disorder, Somatization Disorder, Specific Phobias, Stendhal syndrome, Stereotypic movement disorder, Stimulant Addiction, Stuttering (now known as Childhood Onset Fluency Disorder), Substance related disorder, Tardive dyskinesia, Tobacco Addiction, Tourettes Syndrome, Transient tic disorder, Transient global amnesia, Transvestic Disorder, Trichotillomania, Undifferentiated Somatoform Disorder, Vaginismus, and Voyeuristic Disorder.

[1052] Various lung diseases may be treated with pharmaceutical compositions, biocircuits, biocircuit components, effector modules including their SREs or payloads of the present invention. As a non-limiting example, the lung diseases may be Asbestosis, Asthma, Bronchiectasis, Bronchitis, Chronic Cough, Chronic Obstructive Pulmonary Disease (COPD), Croup, Cystic Fibrosis, Hantavirus, Idiopathic Pulmonary Fibrosis, Pertussis, Pleurisy, Pneumonia, Pulmonary Embolism, Pulmonary Hypertension, Sarcoidosis, Sleep Apnea, Spirometry, Sudden Infant Death Syndrome (SIDS), Tuberculosis, Alagille Syndrome, Autoimmune Hepatitis, Biliary Atresia, Cirrhosis, ERCP (Endoscopic Retrograde Cholangiopancreatography), and Hemochromatosis. Nonalcoholic Steatohepatitis, Porphyria, Primary Biliary Cirrhosis, Primary Sclerosing Cholangitis.

[1053] Various bone diseases may be treated with pharmaceutical compositions, biocircuits, biocircuit components, effector modules including their SREs or payloads of the present invention. As a non-limiting example, the bone diseases may be osteoporosis, neurofibromatosis, osteogenesis imperfecta (OI), rickets, osteosarcoma, achondroplasia, fracture, osteomyelitis, Ewing tumor of bone, osteomalacia, hip dysplasia, Paget disease of bone, marble bone disease, osteochondroma, bone cancer, bone disease, osteochondrosis, osteoma, fibrous dysplasia, cleidocranial dysostosis, osteoclastoma, bone cyst, metabolic bone disease, melorheostosis, callus, Caffey syndrome, and mandibulofacial dysostosis.

[1054] Various blood diseases may be treated with pharmaceutical compositions, biocircuits, biocircuit components, effector modules including their SREs or payloads of the present invention. As a non-limiting example, the blood diseases may be Anemia and CKD (for health care professionals), Aplastic Anemia and Myelodysplastic Syndromes, Deep Vein Thrombosis, Hemochromatosis, Hemophilia, Henoch-Schonlein Purpura, Idiopathic Thrombocytopenic Purpura, Iron-Deficiency Anemia, Pernicious Anemia, Pulmonary Embolism, Sickle Cell Anemia, Sickle Cell Trait and Other Hemoglobinopathies, Thalassemia, Thrombotic Thrombocytopenic Purpura, and Von Willebrand Disease.

### 8. Gene Editing

[1055] The CRISPR-Cas9 system is a novel genome editing system which has been rapidly developed and implemented in a multitude of model organisms and cell types, and supplants other genome editing technologies, such as TALENs and ZFNs. CRISPRs are sequence motifs are present in bacterial and archaeal genomes, and are composed of short (about 24-48 nucleotide) direct repeats separated by similarly sized, unique spacers (Grissa et al. BMC Bioinformatics 8, 172 (2007). They are generally flanked by a set of CRISPR-associated (Cas) protein-coding genes that are required for CRISPR maintenance and function (Barrangou et al., Science 315, 1709 (2007), Brouns et al., Science 321, 960 (2008), Haft et al. PLoS Comput Biol 1, e60 (2005). CRISPR-Cas systems provide adaptive immunity against invasive genetic elements (e.g., viruses, phages and plasmids) (Horvath and Barrangou, Science, 2010, 327: 167-170; Bhaya et al., Annu. Rev. Genet., 2011, 45: 273-297; and Brrangou R, RNA, 2013, 4: 267-278). Three different types of CRISPR-Cas systems have been classified in bacteria and the type II CRISPR-Cas system is most studied. In the bacterial Type II CRISPR-Cas system, small CRISPR RNAs (crRNAs) processed from the pre-repeat-spacer transcript (pre-crRNA) in the presence of a trans-activating RNA (tracrRNA)/Cas9 can form a duplex with the tracrRNA/Cas9 complex. The mature complex is recruited to a target double strand DNA sequence that is complementary to the spacer sequence in the tracrRNA: crRNA duplex to cleave the target DNA by Cas9 endonuclease (Garneau et al., Nature, 2010, 468: 67-71; Jinek et al., Science, 2012, 337: 816-821; Gasiunas et al., Proc. Natl Acad. Sci. USA., 109: E2579-2586; and Haurwitz et al., Science, 2010, 329: 1355-1358). Target recognition and cleavage by the crRNA: tracrRNA/Cas9 complex in the type II CRISPR-CAS system not only requires a sequence in the tracrRNA: crRNA duplex that is a complementary to the target sequence (also called “protospacer” sequence) but also requires a protospacer adjacent motif (PAM) sequence located 3′end of the protospacer sequence of a target polynucleotide. The PAM motif can vary between different CRISPR-Cas systems.

[1056] CRISPR-Cas9 systems have been developed and modified for use in genetic editing and prove to be a high effective and specific technology for editing a nucleic acid sequence even in eukaryotic cells. Many researchers disclosed various modifications to the bacterial CRISPR-Cas systems and demonstrated that CRISPR-Cas systems can be used to manipulate a nucleic acid in a cell, such as in a mammalian cell and in a plant cell. Representative references include U.S. Pat. Nos. 8,993,233; 8,999,641; 8,945,839; 8,932,814; 8,906, 616; 8,895,308; 8,889,418; 8,889,356; 8,871,445; 8,865,406; 8,771,945; and 8,697,359; US patent publication NOs. 20150031134; 20150203872; 20150218253; 20150176013; 20150191744; 20150071889; 20150067922; and 20150167000; each of which is incorporated herein by reference in their entirety.

[1057] However, controlling the effects and activity of the CRISPR-Cas system (e.g., guide RNA and nuclease) has been challenging and often can be problematic.

[1058] The biocircuits of the present invention and/or any of their components may be utilized in regulating or tuning the CRISPR/Cas9 system in order to optimize its utility.

[1059] In some embodiments, the payloads of the effector modules of the invention may include alternative isoforms or orthologs of the Cas9 enzyme.

[1060] The most commonly used Cas9 is derived from Streptococcus pyogenes and the RuvC domain can be inactivated by a D10A mutation and the HNH domain can be inactivated by an H840A mutation.

[1061] In addition to Cas9 derived from S. pyogenes, other RNA guided endonucleases (RGEN) may also be used for programmable genome editing. Cas9 sequences have been identified in more than 600 bacterial strains. Though Cas9 family shows high diversity of amino acid sequences and protein sizes, All Cas9 proteins share a common architecture with a central HNH nuclease domain and a split RuvC/RHase H domain. Examples of Cas9 orthologs from other bacterial strains including but not limited to, Cas proteins identified in Acaryochloris marina MBIC11017; Acetohalobium arabaticum DSM 5501; Acidithiobacillus caldus; Acidithiobacillus ferrooxidans ATCC 23270; Alicyclobacillus acidocaldarius LAA1; Alicyclobacillus acidocaldarius subsp. acidocaldarius DSM 446; Allochromatium vinosum DSM 180; Ammonfex degensii KC4; Anabaena variabilis ATCC 29413; Arthrospira maxima CS-328; Arthrospira platensis str. Paraca; Arthrospira sp. PCC 8005; Bacillus pseudomycoides DSM 12442; Bacillus selenitireducens MLS10; Burkholderiales bacterium 1_1_47; Caldicelulosiruptor becscii DSM 6725; Candidatus Desulforudis audaxviator MP104C; Caldicellulosiruptor hydrothermalis_108; Clostridium phage c-st; Clostridium botulinum A3 str. LochMaree; Clostridium botulinum Ba4 str. 657; Clostridium difficile QCD-63q42; Crocosphaera watsonii WH 8501; Cyanothece sp. ATCC 51142; Cyanothece sp. CCY0110; Cyanothece sp. PCC 7424; Cyanothece sp. PCC 7822; Exiguobacterium sibiricum 255-15; Finegoldia magna ATCC 29328; Ktedonobacter racemifer DSM 44963; Lactobacillus delbrueckii subsp. bulgaricus PB2003/044-T3-4; Lactobacillus salivarius ATCC 11741; Listeria innocua; Lyngbya sp. PCC 8106; Marinobacter sp. ELB17; Methanohalobium evestigatum Z-7303; Microcystis phage Ma-LMM01; Microcystis aeruginosa NIES-843; Microscilla marina ATCC 23134; Microcoleus chthonoplastes PCC 7420; Neisseria meningitidis; Nitrosococcus halophilus Nc4; Nocardiopsis dassonvillei subsp. dassonvillei DSM 43111; Nodularia spumigena CCY9414; Nostoc sp. PCC 7120; Oscillatoria sp. PCC 6506; Pelotomaculum thermopropionicum SI; Petrotoga mobilis SJ95; Polaromonas naphthalenivorans CJ2; Polaromonas sp. JS666; Pseudoalteromonas haloplanktis TAC125; Streptomyces pristinaespiralis ATCC 25486; Streptomyces pristinaespiralis ATCC 25486; Streptococcus thermophilus; Streptomyces viridochromogenes DSM 40736; Streptosporangium roseum DSM 43021; Synechococcus sp. PCC 7335; and Thermosipho africanus TCF52B (Chylinski et al., RNA Biol., 2013; 10(5): 726-737).

[1062] In addition to Cas9 orthologs, other Cas9 variants such as fusion proteins of inactive dCas9 and effector domains with different functions may be served as a platform for genetic modulation. Any of the foregoing enzymes may be useful in the present invention.

### 9. Stem Cell Applications

[1063] The biocircuits of the present invention and/or any of their components may be utilized in the regulated reprogramming of cells, stem cell engraftment or other application where controlled or tunable expression of such reprogramming factors are useful.

[1064] The biocircuits of the present invention may be used in reprogramming cells including stem cells or induced stem cells. Induction of induced pluripotent stem cells (iPSC) was first achieved by Takahashi and Yamanaka (Cell, 2006. 126(4):663-76; herein incorporated by reference in its entirety) using viral vectors to express KLF4, c-MYC, OCT4 and SOX2 otherwise collectively known as KMOS.

[1065] Excisable lentiviral and transposon vectors, repeated application of transient plasmid, episomal and adenovirus vectors have also been used to try to derive iPSC (Chang, C.-W., et al., Stem Cells, 2009. 27(5):1042-1049; Kaji, K., et al., Nature, 2009. 458(7239):771-5; Okita, K., et al., Science, 2008. 322(5903):949-53; Stadtfeld, M., et al., Science, 2008. 322(5903):945-9; Woltjen, K., et al., Nature, 2009; Yu, J., et al., Science, 2009:1172482; Fusaki, N., et al., Proc Jpn Acad Ser B Phys Biol Sci, 2009. 85(8):348-62; each of which is herein incorporated by reference in its entirety).

[1066] DNA-free methods to generate human iPSC has also been derived using serial protein transduction with recombinant proteins incorporating cell-penetrating peptide moieties (Kim, D., et al., Cell Stem Cell, 2009. 4(6): 472-476; Zhou, H., et al., Cell Stem Cell, 2009. 4(5):381-4; each of which is herein incorporated by reference in its entirety), and infectious transgene delivery using the Sendai virus (Fusaki, N., et al., Proc Jpn Acad Ser B Phys Biol Sci, 2009. 85(8): p. 348-62; herein incorporated by reference in its entirety).

[1067] The effector modules of the present invention may include a payload comprising any of the genes including, but not limited to, OCT such as OCT4, SOX such as SOX1, SOX2, SOX3, SOX15 and SOX18, NANOG, KLF such as KLF1, KLF2, KLF4 and KLF5, MYC such as c-MYC and n-MYC, REM2, TERT and LIN28 and variants thereof in support of reprogramming cells. Sequences of such reprogramming factors are taught in for example International Application PCT/US2013/074560, the contents of which are incorporated herein by reference in their entirety.

### IV. DOSING AND ADMINISTRATIONS

[1068] The present invention provides methods comprising administering any one or more compositions for immunotherapy to a subject in need thereof. These may be administered to a subject using any amount and any route of administration effective for preventing or treating a clinical condition such as cancer, infection diseases and other immunodeficient diseases.

[1069] Compositions in accordance with the invention are typically formulated in dosage unit form for ease of administration and uniformity of dosage. It will be understood, however, that the total daily usage of the compositions of the present invention may be decided by the attending physician within the scope of sound medical judgment. The specific therapeutically effective, or prophylactically effective dose level for any particular patient will depend upon a variety of factors including the disorder being treated and the severity of the disorder; the activity of the specific compound employed; the specific composition employed; the age, body weight, general health, sex and diet of the patient; the time of administration, route of administration, previous or concurrent therapeutic interventions and rate of excretion of the specific compound employed; the duration of the treatment; drugs used in combination or coincidental with the specific compound employed; and like factors well known in the medical arts.

[1070] The destabilizing domains (DDs), effector modules and biocircuit systems of the invention and compositions comprising the same, may be administered by any route to achieve a therapeutically effective outcome.

[1071] These include, but are not limited to enteral (into the intestine), gastroenteral, epidural (into the dura matter), oral (by way of the mouth), transdermal, peridural, intracerebral (into the cerebrum), intracerebroventricular (into the cerebral ventricles), epicutaneous (application onto the skin), intradermal, (into the skin itself), subcutaneous (under the skin), nasal administration (through the nose), intravenous (into a vein), intravenous bolus, intravenous drip, intraarterial (into an artery), intramuscular (into a muscle), intracardiac (into the heart), intraosseous infusion (into the bone marrow), intrathecal (into the spinal canal), intraperitoneal, (infusion or injection into the peritoneum), intravesical infusion, intravitreal, (through the eye), intracavernous injection (into a pathologic cavity) intracavitary (into the base of the penis), intravaginal administration, intrauterine, extra-amniotic administration, transdermal (diffusion through the intact skin for systemic distribution), transmucosal (diffusion through a mucous membrane), transvaginal, insufflation (snorting), sublingual, sublabial, enema, eye drops (onto the conjunctiva), in ear drops, auricular (in or by way of the ear), buccal (directed toward the cheek), conjunctival, cutaneous, dental (to a tooth or teeth), electro-osmosis, endocervical, endosinusial, endotracheal, extracorporeal, hemodialysis, infiltration, interstitial, intra-abdominal, intra-amniotic, intra-articular, intrabiliary, intrabronchial, intrabursal, intracartilaginous (within a cartilage), intracaudal (within the cauda equine), intracisternal (within the cisterna magna cerebellomedularis), intracorneal (within the cornea), dental intracornal, intracoronary (within the coronary arteries), intracorporus cavernosum (within the dilatable spaces of the corporus cavernosa of the penis), intradiscal (within a disc), intraductal (within a duct of a gland), intraduodenal (within the duodenum), intradural (within or beneath the dura), intraepidermal (to the epidermis), intraesophageal (to the esophagus), intragastric (within the stomach), intragingival (within the gingivae), intraileal (within the distal portion of the small intestine), intralesional (within or introduced directly to a localized lesion), intraluminal (within a lumen of a tube), intralymphatic (within the lymph), intramedullary (within the marrow cavity of a bone), intrameningeal (within the meninges), intramyocardial (within the myocardium), intraocular (within the eye), intraovarian (within the ovary), intrapericardial (within the pericardium), intrapleural (within the pleura), intraprostatic (within the prostate gland), intrapulmonary (within the lungs or its bronchi), intrasinal (within the nasal or periorbital sinuses), intraspinal (within the vertebral column), intrasynovial (within the synovial cavity of a joint), intratendinous (within a tendon), intratesticular (within the testicle), intrathecal (within the cerebrospinal fluid at any level of the cerebrospinal axis), intrathoracic (within the thorax), intratubular (within the tubules of an organ), intratumor (within a tumor), intratympanic (within the aurus media), intravascular (within a vessel or vessels), intraventricular (within a ventricle), iontophoresis (by means of electric current where ions of soluble salts migrate into the tissues of the body), irrigation (to bathe or flush open wounds or body cavities), laryngeal (directly upon the larynx), nasogastric (through the nose and into the stomach), occlusive dressing technique (topical route administration which is then covered by a dressing which occludes the area), ophthalmic (to the external eye), oropharyngeal (directly to the mouth and pharynx), parenteral, percutaneous, periarticular, peridural, perineural, periodontal, rectal, respiratory (within the respiratory tract by inhaling orally or nasally for local or systemic effect), retrobulbar (behind the pons or behind the eyeball), intramyocardial (entering the myocardium), soft tissue, subarachnoid, subconjunctival, submucosal, topical, transplacental (through or across the placenta), transtracheal (through the wall of the trachea), transtympanic (across or through the tympanic cavity), ureteral (to the ureter), urethral (to the urethra), vaginal, caudal block, diagnostic, nerve block, biliary perfusion, cardiac perfusion, photopheresis or spinal.

[1072] In some embodiments, compositions of the present invention, may be administered by any of the methods of administration taught in the copending commonly owned U.S. Provisional Patent Application No. 62/320,864 filed on Apr. 11, 2016 or in U.S. Provisional Application No. 62/466,596 filed Mar. 3, 2017 and the International Publication WO2017/180587, the contents of each of which are incorporated herein by reference in their entirety.

### Kits and Applications

[1073] The also provides a kit comprising any of the polynucleotides or expression vectors described herein.

[1074] The present invention includes a variety of kits for conveniently and/or effectively carrying out methods of the present invention. Typically, kits will comprise sufficient amounts and/or numbers of components to allow a user to perform one or multiple treatments of a subject(s) and/or to perform one or multiple experiments.

[1075] In one embodiment, the present invention provides kits for inhibiting genes in vitro or in vivo, comprising a biocircuit of the present invention or a combination of biocircuits of the present invention, optionally in combination with any other suitable active agents.

[1076] The kit may further comprise packaging and instructions and/or a delivery agent to form a formulation composition. The delivery agent may comprise, for example, saline, a buffered solution.

[1077] In additional embodiments, assay screening kits are provided. The kit includes a container for the screening assay. An instruction for the use of the assay and the information about the screening method are to be included in the kit.

[1078] In some embodiments, the DDs, effector modules and biocircuit system and compositions of the invention may be used as research tools to investigate protein activity in a biological system such a cell and a subject. In other embodiments, the DDs, effector modules and biocircuit system and compositions of the invention may be used for treating a disease such as a cancer and a genetic disorder.

### V. DELIVERY MODALITIES AND/OR VECTOR

### Vectors

[1079] The present invention also provides vectors that package polynucleotides of the invention encoding biocircuits, effector modules, SREs (DDs) and payload constructs, and combinations thereof. Vectors of the present invention may also be used to deliver the packaged polynucleotides to a cell, a local tissue site or a subject. These vectors may be of any kind, including DNA vectors, RNA vectors, plasmids, viral vectors and particles. Viral vector technology is well known and described in Sambrook et al. (2001, Molecular Cloning: A Laboratory Manual, Cold Spring Harbor Laboratory, New York). Viruses, which are useful as vectors include, but are not limited to lentiviral vectors, adenoviral vectors, adeno-associated viral (AAV) vectors, herpes simplex viral vectors, retroviral vectors, oncolytic viruses, and the like.

[1080] In general, vectors contain an origin of replication functional in at least one organism, a promoter sequence and convenient restriction endonuclease site, and one or more selectable markers e.g. a drug resistance gene.

[1081] As used herein a promoter is defined as a DNA sequence recognized by transcription machinery of the cell, required to initiate specific transcription of the polynucleotide sequence of the present invention. Vectors can comprise native or non-native promoters operably linked to the polynucleotides of the invention. The promoters selected may be strong, weak, constitutive, inducible, tissue specific, development stage-specific, and/or organism specific. One example of a suitable promoter is the immediate early cytomegalovirus (CMV) promoter sequence. This promoter sequence is a strong constitutive promoter sequence capable of driving high levels of expression of polynucleotide sequence that is operatively linked to it. Another example of a preferred promoter is Elongation Growth Factor-1. Alpha (EF-1. alpha). Other constitutive promoters may also be used, including, but not limited to simian virus 40 (SV40), mouse mammary tumor virus (MMTV), human immunodeficiency virus (HIV), long terminal repeat (LTR), promoter, an avian leukemia virus promoter, an Epstein-Barr virus immediate early promoter, a Rous sarcoma virus promoter as well as human gene promoters including, but not limited to the phosphoglycerate kinase (PGK) promoter, actin promoter, the myosin promoter, the hemoglobin promoter, the Ubiquitin C (Ubc) promoter, the human U6 small nuclear protein promoter and the creatine kinase promoter. In some instances, inducible promoters such as but not limited to metallothionine promoter, glucocorticoid promoter, a progesterone promoter, and a tetracycline promoter may be used. In some embodiments, the promoter may be selected from the following a CMV promoter, comprising a nucleotide sequence of SEQ ID NO. 3099, a PGK promoter, comprising a nucleotide sequence of SEQ ID NO. 3100, and an EF1a promoter, comprising a nucleotide sequence of SEQ ID NO. 3101, or SEQ ID NO. 3102.

[1082] In some embodiments, the optimal promoter may be selected based on its ability to achieve minimal expression of the SREs and payloads of the invention in the absence of the ligand and detectable expression in the presence of the ligand.

[1083] Additional promoter elements e.g. enhancers may be used to regulate the frequency of transcriptional initiation. Such regions may be located 10-100 base pairs upstream or downstream of the start site. In some instances, two or more promoter elements may be used to cooperatively or independently activate transcription.

[1084] In some embodiments, the recombinant expression vector may comprise regulatory sequences, such as transcription and translation initiation and termination codons, which are specific to the type of host cell into which the vector is to be introduced.

### 1. Lentiviral Vectors

[1085] In some embodiments, lentiviral vectors/particles may be used as vehicles and delivery modalities. Lentiviruses are subgroup of the Retroviridae family of viruses, named because reverse transcription of viral RNA genomes to DNA is required before integration into the host genome. As such, the most important features of lentiviral vehicles/particles are the integration of their genetic material into the genome of a target/host cell. Some examples of lentivirus include the Human Immunodeficiency Viruses: HIV-1 and HIV-2, the Simian Immunodeficiency Virus (SIV), feline immunodeficiency virus (FIV), bovine immunodeficiency virus (BIV), Jembrana Disease Virus (JDV), equine infectious anemia virus (EIAV), equine infectious anemia virus, visna-maedi and caprine arthritis encephalitis virus (CAEV).

[1086] Typically, lentiviral particles making up the gene delivery vehicle are replication defective on their own (also referred to as “self-inactivating”). Lentiviruses are able to infect both dividing and non-dividing cells by virtue of the entry mechanism through the intact host nuclear envelope (Naldini L et al., Curr. Opin. Biotechnol, 1998, 9: 457-463). Recombinant lentiviral vehicles/particles have been generated by multiply attenuating the HIV virulence genes, for example, the genes Env, Vif, Vpr, Vpu, Nef and Tat are deleted making the vector biologically safe. Correspondingly, lentiviral vehicles, for example, derived from HIV-1/HIV-2 can mediate the efficient delivery, integration and long-term expression of transgenes into non-dividing cells. As used herein, the term “recombinant” refers to a vector or other nucleic acid containing both lentiviral sequences and non-lentiviral retroviral sequences.

[1087] Lentiviral particles may be generated by co-expressing the virus packaging elements and the vector genome itself in a producer cell such as human HEK293T cells. These elements are usually provided in three (in second generation lentiviral systems) or four separate plasmids (in third generation lentiviral systems). The producer cells are co-transfected with plasmids that encode lentiviral components including the core (i.e. structural proteins) and enzymatic components of the virus, and the envelope protein(s) (referred to as the packaging systems), and a plasmid that encodes the genome including a foreign transgene, to be transferred to the target cell, the vehicle itself (also referred to as the transfer vector). In general, the plasmids or vectors are included in a producer cell line. The plasmids/vectors are introduced via transfection, transduction or infection into the producer cell line. Methods for transfection, transduction or infection are well known by those of skill in the art. As non-limiting example, the packaging and transfer constructs can be introduced into producer cell lines by calcium phosphate transfection, lipofection or electroporation, generally together with a dominant selectable marker, such as neo, DHFR, Gln synthetase or ADA, followed by selection in the presence of the appropriate drug and isolation of clones.

[1088] The producer cell produces recombinant viral particles that contain the foreign gene, for example, the effector module of the present invention. The recombinant viral particles are recovered from the culture media and titrated by standard methods used by those of skill in the art. The recombinant lentiviral vehicles can be used to infect target cells.

[1089] Cells that can be used to produce high-titer lentiviral particles may include, but are not limited to, HEK293T cells, 293G cells, STAR cells (Relander et al., Mol. Ther., 2005, 11: 452-459), FreeStyle™ 293 Expression System (ThermoFisher, Waltham, MA), and other HEK293T-based producer cell lines (e.g., Stewart et al., Hum Gene Ther. 2011, 22(3):357-369; Lee et al., Biotechnol Bioeng, 2012, 10996): 1551-1560; Throm et al., Blood. 2009, 113(21): 5104-5110; the contents of each of which are incorporated herein by reference in their entirety).

[1090] In some aspects, the envelope proteins may be heterologous envelop proteins from other viruses, such as the G protein of vesicular stomatitis virus (VSV G) or baculoviral gp64 envelop proteins. The VSV-G glycoprotein may especially be chosen among species classified in the vesiculovirus genus: Carajas virus (CJSV), Chandipura virus (CHPV), Cocal virus (COCV), Isfahan virus (ISFV), Maraba virus (MARAV), Piry virus (PIRYV), Vesicular stomatitis Alagoas virus (VSAV), Vesicular stomatitis Indiana virus (VSIV) and Vesicular stomatitis New Jersey virus (VSNJV) and/or stains provisionally classified in the vesiculovirus genus as Grass carp rhabdovirus, BeAn 157575 virus (BeAn 157575), Boteke virus (BTKV), Calchaqui virus (CQIV), Eel virus American (EVA), Gray Lodge virus (GLOV), Jurona virus (JURY), Klamath virus (KLAV), Kwatta virus (KWAV), La Joya virus (LJV), Malpais Spring virus (MSPV), Mount Elgon bat virus (MEBV), Perinet virus (PERV), Pike fry rhabdovirus (PFRV), Porton virus (PORV), Radi virus (RADIV), Spring viremia of carp virus (SVCV), Tupaia virus (TUPV), Ulcerative disease rhabdovirus (UDRV) and YugBogdanovac virus (YBV). The gp64 or other baculoviral env protein can be derived from Autographa californica nucleopolyhedrovirus (AcMNPV), Anagrapha falcifera nuclear polyhedrosis virus, Bombyx mori nuclear polyhedrosis virus, Choristoneura fumiferana nucleopolyhedrovirus, Orgyia pseudotsugata single capsid nuclear polyhedrosis virus, Epiphyas postvittana nucleopolyhedrovirus, Hyphantria cunea nucleopolyhedrovirus, Galleria mellonella nuclear polyhedrosis virus, Dhori virus, Thogoto virus, Antheraea pemyi nucleopolyhedrovirus or Batken virus.

[1091] Additional elements provided in lentiviral particles may comprise retroviral LTR (long-terminal repeat) at either 5′ or 3′ terminus, a retroviral export element, optionally a lentiviral reverse response element (RRE), a promoter or active portion thereof, and a locus control region (LCR) or active portion thereof. Other elements include central polypurine tract (cPPT) sequence to improve transduction efficiency in non-dividing cells, Woodchuck Hepatitis Virus (WHP) Posttranscriptional Regulatory Element (WPRE) which enhances the expression of the transgene, and increases titer. The effector module is linked to the vector.

[1092] Methods for generating recombinant lentiviral particles are discussed in the art, for example, U.S. Pat. Nos. 8,846,385; 7,745, 179; 7,629,153; 7,575,924; 7,179, 903; and 6,808,905; the contents of each of which are incorporated herein by reference in their entirety.

[1093] Lentivirus vectors used may be selected from, but are not limited to pLVX, pLenti, pLenti6, pLJM1, FUGW, pWPXL, pWPI, pLenti CMV puro DEST, pLJM1-EGFP, pULTRA, pInducer20, pHIV-EGFP, pCW57.1, pTRPE, pELPS, pRRL, and pLionII.

[1094] Lentiviral vehicles known in the art may also be used (See, U.S. Pat. Nos. 9,260,725; 9,068,199; 9,023,646; 8,900,858; 8,748,169; 8,709,799; 8,420,104; 8,329,462; 8,076,106; 6,013,516; and 5,994,136; International Patent Publication NO. WO2012079000; the contents of each of which are incorporated herein by reference in their entirety).

### 2. Retroviral Vectors (7-Retroviral Vectors)

[1095] In some embodiments, retroviral vectors may be used to package and deliver the biocircuits, biocircuit components, effector modules, SREs or payload constructs of the present invention. Retroviral vectors (RVs) allow the permanent integration of a transgene in target cells. In addition to lentiviral vectors based on complex HIV-1/2, retroviral vectors based on simple gamma-retroviruses have been widely used to deliver therapeutic genes and demonstrated clinically as one of the most efficient and powerful gene delivery systems capable of transducing a broad range of cell types. Example species of Gamma retroviruses include the murine leukemia viruses (MLVs) and the feline leukemia viruses (FeLV).

[1096] In some embodiments, gamma-retroviral vectors derived from a mammalian gamma-retrovirus such as murine leukemia viruses (MLVs), are recombinant. The MLV families of gamma retroviruses include the ecotropic, amphotropic, xenotropic and polytropic subfamilies. Ecotropic viruses are able to infect only murine cells using mCAT-1 receptor. Examples of ecotropic viruses are Moloney MLV and AKV. Amphotropic viruses infect murine, human and other species through the Pit-2 receptor. One example of an amphotropic virus is the 4070A virus. Xenotropic and polytropic viruses utilize the same (Xpr1) receptor, but differ in their species tropism. Xenotropic viruses such as NZB-9-1 infect human and other species but not murine species, whereas polytropic viruses such as focus-forming viruses (MCF) infect murine, human and other species.

[1097] Gamma-retroviral vectors may be produced in packaging cells by co-transfecting the cells with several plasmids including one encoding the retroviral structural and enzymatic (gag-pol) polyprotein, one encoding the envelope (env) protein, and one encoding the vector mRNA comprising polynucleotide encoding the compositions of the present invention that is to be packaged in newly formed viral particles.

[1098] In some aspects, the recombinant gamma-retroviral vectors are pseudotyped with envelope proteins from other viruses. Envelope glycoproteins are incorporated in the outer lipid layer of the viral particles which can increase/alter the cell tropism. Exemplary envelop proteins include the gibbon ape leukemia virus envelope protein (GALV) or vesicular stomatitis virus G protein (VSV-G), or Simian endogenous retrovirus envelop protein, or Measles Virus H and F proteins, or Human immunodeficiency virus gp120 envelope protein, or cocal vesiculovirus envelop protein (See, e.g., U.S. application publication NO. 2012/164118; the contents of which are incorporated herein by reference in its entirety). In other aspects, envelope glycoproteins may be genetically modified to incorporate targeting/binding ligands into gamma-retroviral vectors, binding ligands including, but not limited to, peptide ligands, single chain antibodies and growth factors (Waehler et al., Nat. Rev. Genet. 2007, 8(8):573-587; the contents of which are incorporated herein by reference in its entirety). These engineered glycoproteins can retarget vectors to cells expressing their corresponding target moieties. In other aspects, a “molecular bridge” may be introduced to direct vectors to specific cells. The molecular bridge has dual specificities: one end can recognize viral glycoproteins, and the other end can bind to the molecular determinant on the target cell. Such molecular bridges, for example ligand-receptor, avidin-biotin, and chemical conjugations, monoclonal antibodies and engineered fusogenic proteins, can direct the attachment of viral vectors to target cells for transduction (Yang et al., Biotechnol. Bioeng., 2008, 101(2): 357-368; and Maetzig et al., Viruses, 2011, 3, 677-713; the contents of each of which are incorporated herein by reference in their entirety).

[1099] In some embodiments, the recombinant gamma-retroviral vectors are self-inactivating (SIN) gammaretroviral vectors. The vectors are replication incompetent. SIN vectors may harbor a deletion within the 3′ U3 region initially comprising enhancer/promoter activity. Furthermore, the 5′ U3 region may be replaced with strong promoters (needed in the packaging cell line) derived from Cytomegalovirus or RSV, or an internal promoter of choice, and/or an enhancer element. The choice of the internal promoters may be made according to specific requirements of gene expression needed for a particular purpose of the invention.

[1100] In some embodiments, polynucleotides encoding the biocircuit, biocircuit components, effector module, SRE are inserted within the recombinant viral genome. The other components of the viral mRNA of a recombinant gamma-retroviral vector may be modified by insertion or removal of naturally occurring sequences (e.g., insertion of an IRES, insertion of a heterologous polynucleotide encoding a polypeptide or inhibitory nucleic acid of interest, shuffling of a more effective promoter from a different retrovirus or virus in place of the wild-type promoter and the like). In some examples, the recombinant gamma-retroviral vectors may comprise modified packaging signal, and/or primer binding site (PBS), and/or 5′-enhancer/promoter elements in the U3-region of the 5′-long terminal repeat (LTR), and/or 3′-SIN elements modified in the U3-region of the 3′-LTR. These modifications may increase the titers and the ability of infection.

[1101] Gamma retroviral vectors suitable for delivering biocircuit components, effector modules, SREs or payload constructs of the present invention may be selected from those disclosed in U.S. Pat. Nos. 8,828,718; 7,585,676; 7,351,585; U.S. application publication NO. 2007/048285; PCT application publication NOs. WO2010/113037; WO2014/121005; WO2015/056014; and EP Pat. NOs. EP1757702; EP1757703 (the contents of each of which are incorporated herein by reference in their entirety).

### 3. Adeno-Associated Viral Vectors (AAV)

[1102] In some embodiments, polynucleotides of present invention may be packaged into recombinant adeno-associated viral (rAAV) vectors. Such vectors or viral particles may be designed to utilize any of the known serotype capsids or combinations of serotype capsids. The serotype capsids may include capsids from any identified AAV serotypes and variants thereof, for example, AAV1, AAV2, AAV2G9, AAV3, AAV4, AAV4-4, AAV5, AAV6, AAV7, AAV8, AAV9, AAV10, AAV11, AAV12 and AAVrh10.

[1103] In one embodiment, the AAV serotype may be or have a sequence as described in United States Publication No. US20030138772, herein incorporated by reference in its entirety, such as, but not limited to, AAV1 (SEQ ID NO. 6 and 64 of US20030138772), AAV2 (SEQ ID NO. 7 and 70 of US20030138772), AAV3 (SEQ ID NO. 8 and 71 of US20030138772), AAV4 (SEQ ID NO. 63 of US20030138772), AAV5 (SEQ ID NO. 114 of US20030138772), AAV6 (SEQ ID NO. 65 of US20030138772), AAV7 (SEQ ID NO. 1-3 of US20030138772), AAV8 (SEQ ID NO. 4 and 95 of US20030138772), AAV9 (SEQ ID NO. 5 and 100 of US20030138772), AAV10 (SEQ ID NO. 117 of US20030138772), AAV11 (SEQ ID NO. 118 of US20030138772), AAV12 (SEQ ID NO. 119 of US20030138772), AAVrh10 (amino acids 1 to 738 of SEQ ID NO. 81 of US20030138772) or variants thereof. Non-limiting examples of variants include SEQ ID NOs. 9, 27-45, 47-62, 66-69, 73-81, 84-94, 96, 97, 99, 101-113 of US20030138772, the contents of which are herein incorporated by reference in their entirety.

[1104] In one embodiment, the AAV serotype may have a sequence as described in Pulicherla et al. (Molecular Therapy, 2011, 19(6):1070-1078), U.S. Pat. Nos. 6,156,303; 7,198,951; U.S. Patent Publication NOs. US2015/0159173 and US2014/0359799; and International Patent Publication NOs. WO1998/011244, WO2005/033321 and WO2014/14422; the contents of each of which are incorporated herein by reference in their entirety.

[1105] AAV vectors include not only single stranded vectors but self-complementary AAV vectors (scAAVs). scAAV vectors contain DNA which anneals together to form double stranded vector genome. By skipping second strand synthesis, scAAVs allow for rapid expression in the cell.

[1106] The rAAV vectors may be manufactured by standard methods in the art such as by triple transfection, in sf9 insect cells or in suspension cell cultures of human cells such as HEK293 cells.

[1107] The biocircuits, biocircuit components, effector modules, SREs or payload constructs may be encoded in one or more viral genomes to be packaged in the AAV capsids taught herein.

[1108] Such vectors or viral genomes may also include, in addition to at least one or two ITRs (inverted terminal repeats), certain regulatory elements necessary for expression from the vector or viral genome. Such regulatory elements are well known in the art and include for example promoters, introns, spacers, stuffer sequences, and the like.

[1109] In some embodiments, more than one effector module or SRE (e.g. DD) may be encoded in a viral genome.

### 4. Oncolytic Viruses

[1110] In some embodiments, polynucleotides of present invention may be packaged into oncolytic viruses, such as vaccine viruses. Oncolytic vaccine viruses may include viral particles of a thymidine kinase (TK)-deficient, granulocyte macrophage (GM)-colony stimulating factor (CSF)-expressing, replication-competent vaccinia virus vector sufficient to induce oncolysis of cells in the tumor (e.g., U.S. Pat. No. 9,226,977).

[1111] In some embodiments, the viral vector of the invention may comprise two or more immunotherapeutic agents taught herein, wherein the two or more immunotherapeutic agents may be included in one effector module under the regulation of the same DD. In this case, the two or more immunotherapeutic agents are tuned by the same stimulus simultaneously. In other embodiments, the viral vector of the invention may comprise two or more effector modules, wherein each effector module comprises a different immunotherapeutic agent. In this case, the two or more effector modules and immunotherapeutic agents are tuned by different stimuli, providing separately independent regulation of the two or more components.

5. Messenger RNA (mRNA)

[1112] In some embodiments, the effector modules of the invention may be designed as a messenger RNA (mRNA). As used herein, the term “messenger RNA” (mRNA) refers to any polynucleotide which encodes a polypeptide of interest and which is capable of being translated to produce the encoded polypeptide of interest in vitro, in vivo, in situ or ex vivo. Such mRNA molecules may have the structural components or features of any of those taught in International Publication No. WO2018151666, the contents of which are incorporated herein by reference in its entirety.

[1113] Polynucleotides of the invention may also be designed as taught in, for example, Ribostem Limited in United Kingdom patent application serial number 0316089.2 filed on Jul. 9, 2003 now abandoned, PCT application number PCT/GB2004/002981 filed on Jul. 9, 2004 published as WO2005005622, U.S. patent application national phase entry Ser. No. 10/563,897 filed on Jun. 8, 2006 published as US20060247195 now abandoned, and European patent application national phase entry serial number EP2004743322 filed on Jul. 9, 2004 published as EP1646714 now withdrawn; Novozymes, Inc. in PCT application number PCT/US2007/88060 filed on Dec. 19, 2007 published as WO2008140615, U.S. patent application national phase entry Ser. No. 12/520,072 filed on Jul. 2, 2009 published as US20100028943 and European patent application national phase entry serial number EP2007874376 filed on Jul. 7, 2009 published as EP2104739; University of Rochester in PCT application number PCT/US2006/46120 filed on Dec. 4, 2006 published as WO2007064952 and U.S. patent application Ser. No. 11/606,995 filed on Dec. 1, 2006 published as US20070141030; BioNTech AG in European patent application serial number EP2007024312 filed Dec. 14, 2007 now abandoned, PCT application number PCT/EP2008/01059 filed on Dec. 12, 2008 published as WO2009077134, European patent application national phase entry serial number EP2008861423 filed on Jun. 2, 2010 published as EP2240572, U.S. patent application national phase entry Ser. No. 12/735,060 filed Nov. 24, 2010 published as US20110065103, German patent application serial number DE 10 2005 046 490 filed Sep. 28, 2005, PCT application PCT/EP2006/0448 filed Sep. 28, 2006 published as WO2007036366, national phase European patent EP1934345 published Mar. 21, 2012 and national phase U.S. patent application Ser. No. 11/992,638 filed Aug. 14, 2009 published as 20100129877; Immune Disease Institute Inc. in U.S. patent application Ser. No. 13/088,009 filed Apr. 15, 2011 published as US20120046346 and PCT application PCT/US2011/32679 filed Apr. 15, 2011 published as WO20110130624; Shire Human Genetic Therapeutics in U.S. patent application Ser. No. 12/957,340 filed on Nov. 20, 2010 published as US20110244026; Sequitur Inc. in PCT application PCT/US1998/019492 filed on Sep. 18, 1998 published as WO1999014346; The Scripps Research Institute in PCT application number PCT/US2010/00567 filed on Feb. 24, 2010 published as WO2010098861, and U.S. patent application national phase entry Ser. No. 13/203,229 filed Nov. 3, 2011 published as US20120053333; Ludwig-Maximillians University in PCT application number PCT/EP2010/004681 filed on Jul. 30, 2010 published as WO2011012316; Cellscript Inc. in U.S. Pat. No. 8,039,214 filed Jun. 30, 2008 and granted Oct. 18, 2011, U.S. patent application Ser. No. 12/962,498 filed on Dec. 7, 2010 published as US20110143436, Ser. No. 12/962,468 filed on Dec. 7, 2010 published as US20110143397, Ser. No. 13/237,451 filed on Sep. 20, 2011 published as US20120009649, and PCT applications PCT/US2010/59305 filed Dec. 7, 2010 published as WO2011071931 and PCT/US2010/59317 filed on Dec. 7, 2010 published as WO2011071936; The Trustees of the University of Pennsylvania in PCT application number PCT/US2006/32372 filed on Aug. 21, 2006 published as WO2007024708, and U.S. patent application national phase entry Ser. No. 11/990,646 filed on Mar. 27, 2009 published as US20090286852; Curevac GMBH in German patent application serial numbers DE10 2001 027 283.9 filed Jun. 5, 2001, DE10 2001 062 480.8 filed Dec. 19, 2001, and DE 20 2006 051 516 filed Oct. 31, 2006 all abandoned, European patent numbers EP1392341 granted Mar. 30, 2005 and EP1458410 granted Jan. 2, 2008, PCT application numbers PCT/EP2002/06180 filed Jun. 5, 2002 published as WO2002098443, PCT/EP2002/14577 filed on Dec. 19, 2002 published as WO2003051401, PCT/EP2007/09469 filed on Dec. 31, 2007 published as WO2008052770, PCT/EP2008/03033 filed on Apr. 16, 2008 published as WO2009127230, PCT/EP2006/004784 filed on May 19, 2005 published as WO2006122828, PCT/EP2008/00081 filed on Jan. 9, 2007 published as WO2008083949, and U.S. patent application Ser. No. 10/729,830 filed on Dec. 5, 2003 published as US20050032730, Ser. No. 10/870,110 filed on Jun. 18, 2004 published as US20050059624, Ser. No. 11/914,945 filed on Jul. 7, 2008 published as US20080267873, Ser. No. 12/446,912 filed on Oct. 27, 2009 published as US2010047261 now abandoned, Ser. No. 12/522,214 filed on Jan. 4, 2010 published as US20100189729, Ser. No. 12/787,566 filed on May 26, 2010 published as US20110077287, Ser. No. 12/787,755 filed on May 26, 2010 published as US20100239608, Ser. No. 13/185,119 filed on Jul. 18, 2011 published as US20110269950, and Ser. No. 13/106,548 filed on May 12, 2011 published as US20110311472 all of which are herein incorporated by reference in their entirety.

[1114] In some embodiments, the effector modules may be designed as self-amplifying RNA. “Self-amplifying RNA” as used herein refers to RNA molecules that can replicate in the host resulting in the increase in the amount of the RNA and the protein encoded by the RNA. Such self-amplifying RNA may have structural features or components of any of those taught in International Patent Application Publication No. WO2011005799 (the contents of which are incorporated herein by reference in their entirety).

### VI. DEFINITIONS

[1115] At various places in the present specification, features or functions of the compositions of the present disclosure are disclosed in groups or in ranges. It is specifically intended that the present disclosure include each and every individual subcombination of the members of such groups and ranges. The following is a non-limiting list of term definitions.

[1116] Activity: As used herein, the term “activity” refers to the condition in which things are happening or being done. Compositions of the invention may have activity and this activity may involve one or more biological events. In some embodiments, biological events may include cell signaling events. In some embodiments, biological events may include cell signaling events associated protein interactions with one or more corresponding proteins, receptors, small molecules or any of the biocircuit components described herein.

[1117] Adoptive cell therapy (ACT): The terms “Adoptive cell therapy” or “Adoptive cell transfer”, as used herein, refer to a cell therapy involving in the transfer of cells into a patient, wherein cells may have originated from the patient, or from another individual, and are engineered (altered) before being transferred back into the patient. The therapeutic cells may be derived from the immune system, such as Immune effector cells: CD4+ T cell; CD8+ T cell, Natural Killer cell (NK cell); and B cells and tumor infiltrating lymphocytes (TILs) derived from the resected tumors. Most commonly transferred cells are autologous anti-tumor T cells after ex vivo expansion or manipulation. For example, autologous peripheral blood lymphocytes can be genetically engineered to recognize specific tumor antigens by expressing T-cell receptors (TCR) or chimeric antigen receptor (CAR).

[1118] Agent: As used herein, the term “agent” refers to a biological, pharmaceutical, or chemical compound. Non-limiting examples include simple or complex organic or inorganic molecule, a peptide, a protein, an oligonucleotide, an antibody, an antibody derivative, antibody fragment, a receptor, and soluble factor.

[1119] Agonist: the term “agonist” as used herein, refers to a compound that, in combination with a receptor, can produce a cellular response. An agonist may be a ligand that directly binds to the receptor. Alternatively, an agonist may combine with a receptor indirectly by, for example, (a) forming a complex with another molecule that directly binds to the receptor, or (b) otherwise resulting in the modification of another compound so that the other compound directly binds to the receptor. An agonist may be referred to as an agonist of a particular receptor or family of receptors, e.g., agonist of a co-stimulatory receptor.

[1120] Antagonist: the term “antagonist” as used herein refers to any agent that inhibits or reduces the biological activity of the target(s) it binds.

[1121] Antigen: the term “antigen” as used herein is defined as a molecule that provokes an immune response when it is introduced into a subject or produced by a subject such as tumor antigens which arise by the cancer development itself. This immune response may involve either antibody production, or the activation of specific immunologically-competent cells such as cytotoxic T lymphocytes and T helper cells, or both. An antigen can be derived from organisms, subunits of proteins/antigens, killed or inactivated whole cells or lysates. In the context of the invention, the terms “antigens of interest” or “desired antigens” refers to those proteins and/or other biomolecules provided herein that are immunospecifically bound or interact with antibodies of the present invention and/or fragments, mutants, variants, and/or alterations thereof described herein. In some embodiments, antigens of interest may comprise any of the polypeptides or payloads or proteins described herein, or fragments or portions thereof.

[1122] Approximately: As used herein, the term “approximately” or “about,” as applied to one or more values of interest, refers to a value that is similar to a stated reference value. In certain embodiments, the term “approximately” or “about” refers to a range of values that fall within 25%, 20%, 19%, 18%, 17%, 16%, 15%, 14%, 13%, 12%, 11%, 10%, 9%, 8%, 7%, 6%, 5%, 4%, 3%, 2%, 1%, or less in either direction (greater than or less than) of the stated reference value unless otherwise stated or otherwise evident from the context (except where such number would exceed 100% of a possible value).

[1123] Alkyl: The terms “alkyl”, “alkoxy”, “hydroxyalkyl”, “alkoxy alkyl”, and “alkoxy carbonyl”, as used herein, include both straight and branched chains containing one to twelve carbon atoms, and/or which may or may not be substituted.

[1124] Alkenyl: The terms “alkenyl” and “alkynyl” as used herein alone or as part of a larger moiety shall include both straight and branched chains containing two to twelve carbon atoms.

[1125] Aryl: The term “aryl” as used herein alone or as part of a larger moiety as in “aralkyl”, “aralkoxy”, or “aryloxyalkyl”, refers to monocyclic, bicyclic and tricyclic carbocyclic ring systems having a total of five to fourteen ring members, wherein at least one ring is aromatic and wherein each ring in the system contains 3 to 8 ring members. The term “aryl” may be used interchangeably with the term “aryl ring.”

[1126] Aromatic: The term “aromatic” as used herein, refers to an unsaturated hydrocarbon ring structure with delocalized pi electrons. As used herein “aromatic” may refer to a monocyclic, bicyclic or polycyclic aromatic compounds.

[1127] Aliphatic: The term “aliphatic” or “aliphatic group” as used herein, refers to a straight or branched C1-C8 hydrocarbon chain or a monocyclic C3-C8hydrocarbon or bicyclic C8-C12 hydrocarbon which are fully saturated or that contains one or more units of unsaturation, that is completely saturated or that contains one or more units of unsaturation, but which is not aromatic (also referred to herein as “carbocycle” or “cycloalkyl”), and that has a single point of attachment to the rest of the molecule wherein any individual ring in said bicyclic ring system has 3-7 members.

[1128] Associated with: As used herein, the terms “associated with,” “conjugated,” “linked,” “attached,” and “tethered,” when used with respect to two or more moieties, mean that the moieties are physically associated or connected with one another, either directly or via one or more additional moieties that serve as linking agents, to form a structure that is sufficiently stable so that the moieties remain physically associated under the conditions in which the structure is used, e.g., physiological conditions. An “association” need not be strictly through direct covalent chemical bonding. It may also suggest ionic or hydrogen bonding or a hybridization based connectivity sufficiently stable such that the “associated” entities remain physically associated.

[1129] Autologous: the term “autologous” as used herein is meant to refer to any material derived from the same individual to which it is later to be re-introduced into the individual.

[1130] Barcode: the term “barcode” as used herein refers to polynucleotide or amino acid sequence that distinguishes one polynucleotide or amino acid from another.

[1131] Biocircuit system: As used herein, a “biocircuit” or “biocircuit system” is defined as a circuit within or useful in biologic systems comprising a stimulus and at least one effector module responsive to a stimulus, where the response to the stimulus produces at least one signal or outcome within, between, as an indicator of, or on a biologic system. Biologic systems are generally understood to be any cell, tissue, organ, organ system or organism, whether animal, plant, fungi, bacterial, or viral. It is also understood that biocircuits may be artificial circuits which employ the stimuli or effector modules taught by the present invention and effect signals or outcomes in acellular environments such as with diagnostic, reporter systems, devices, assays or kits. The artificial circuits may be associated with one or more electronic, magnetic, or radioactive components or parts. In the context of the present invention, a biocircuit includes a destabilizing domain (DD) biocircuit system.

[1132] Cancer: the term “cancer” as used herein refers a broad group of various diseases characterized by the uncontrolled growth of abnormal cells in the body. Unregulated cell division and growth results in the formation of malignant tumors that invade neighboring tissues ultimately metastasize to distant parts of the body through the lymphatic system or bloodstream.

[1133] Conservative amino acid substitution: As used herein a” conservative amino acid substitution is one in which an amino acid residue is substituted by another amino acid residue having a side chain (R group) with similar properties (e.g charge or hydrophobicity).

[1134] Co-stimulatory molecule: As used herein, in accordance with its meaning in immune T cell activation, refers to a group of immune cell surface receptor/ligands which engage between T cells and APCs and generate a stimulatory signal in T cells which combines with the stimulatory signal in T cells that results from T cell receptor (TCR) recognition of antigen/MHC complex (pMHC) on APCs

[1135] Cytokines: the term “cytokines”, as used herein, refers to a family of small soluble factors with pleiotropic functions that are produced by many cell types that can influence and regulate the function of the immune system.

[1136] Delivery: the term “delivery” as used herein refers to the act or manner of delivering a compound, substance, entity, moiety, cargo or payload. A “delivery agent” refers to any agent which facilitates, at least in part, the in vivo delivery of one or more substances (including, but not limited to a compound and/or compositions of the present invention) to a cell, subject or other biological system cells.

[1137] Destabilized: As used herein, the term “destable,” “destabilize,” destabilizing region” or “destabilizing domain” means a region or molecule that is less stable than a starting, reference, wild-type or native form of the same region or molecule.

[1138] Engineered: As used herein, embodiments of the invention are “engineered” when they are designed to have a feature or property, whether structural or chemical, that varies from a starting point, wild type or native molecule.

[1139] Expression: As used herein, “expression” of a nucleic acid sequence refers to one or more of the following events: (1) production of an RNA template from a DNA sequence (e.g., by transcription); (2) processing of an RNA transcript (e.g., by splicing, editing, 5′ cap formation, and/or 3′ end processing); (3) translation of an RNA into a polypeptide or protein; (4) folding of a polypeptide or protein; and (5) post-translational modification of a polypeptide or protein.

[1140] Feature: As used herein, a “feature” refers to a characteristic, a property, or a distinctive element.

[1141] Formulation: As used herein, a “formulation” includes at least a compound and/or composition of the present invention and a delivery agent.

[1142] Fragment: A “fragment,” as used herein, refers to a portion. For example, fragments of proteins may comprise polypeptides obtained by digesting full-length protein. In some embodiments, a fragment of a protein includes at least 3, 4, 5, 6, 7, 8, 9, 10, 11, 12, 13, 14, 15, 16, 17, 18, 19, 20, 25, 30, 35, 40, 45, 50, 55, 60, 65, 70, 75, 80, 85, 90, 95, 100, 150, 200, 250 or more amino acids. In some embodiments, fragments of an antibody include portions of an antibody.

[1143] Functional: As used herein, a “functional” biological molecule is a biological entity with a structure and in a form in which it exhibits a property and/or activity by which it is characterized.

[1144] Heterocycle: The term “heterocycle”, “heterocyclyl”, or “heterocyclic” as used herein refers to monocyclic, bicyclic or tricyclic ring systems having three to fourteen ring members in which one or more ring members is a heteroatom, wherein each ring in the system contains 3 to 7 ring members and is non-aromatic.

[1145] Hotspot: As used herein, a “hotspot” or a “mutational hotspot” refers to an amino acid position in a protein coding gene that is mutated (by substitutions) more frequently relative to elsewhere within the same gene.

[1146] Immune cells: the term “an immune cell”, as used herein, refers to any cell of the immune system that originates from a hematopoietic stem cell in the bone marrow, which gives rise to two major lineages, a myeloid progenitor cell (which give rise to myeloid cells such as monocytes, macrophages, dendritic cells, megakaryocytes and granulocytes) and a lymphoid progenitor cell (which give rise to lymphoid cells such as T cells, B cells and natural killer (NK) cells). Exemplary immune system cells include a CD4+ T cell, a CD8+ T cell, a CD4-CD8-double negative T cell, a T γδ cell, a Tap cell, a regulatory T cell, a natural killer cell, and a dendritic cell. Macrophages and dendritic cells may be referred to as “antigen presenting cells” or “APCs,” which are specialized cells that can activate T cells when a major histocompatibility complex (MHC) receptor on the surface of the APC complexed with a peptide interacts with a TCR on the surface of a T cell.

[1147] Immunotherapy: the term “immunotherapy” as used herein, refers to a type of treatment of a disease by the induction or restoration of the reactivity of the immune system towards the disease.

[1148] Immunotherapeutic agent: the term “immunotherapeutic agent” as used herein, refers to the treatment of disease by the induction or restoration of the reactivity of the immune system towards the disease with a biological, pharmaceutical, or chemical compound.

[1149] IC₅₀: As used herein, the term “IC₅₀” refers to the concentration of the ligand where the response or binding is reduced to half.

[1150] In vitro: As used herein, the term “in vitro” refers to events that occur in an artificial environment, e.g., in a test tube or reaction vessel, in cell culture, in a Petri dish, etc., rather than within an organism (e.g., animal, plant, or microbe).

[1151] In vivo: As used herein, the term “in vivo” refers to events that occur within an organism (e.g., animal, plant, or microbe or cell or tissue thereof).

[1152] Linker: As used herein, a linker refers to a moiety that connects two or more domains, moieties or entities. In one embodiment, a linker may comprise 10 or more atoms. In a further embodiment, a linker may comprise a group of atoms, e.g., 10-1,000 atoms, and can be comprised of the atoms or groups such as, but not limited to, carbon, amino, alkylamino, oxygen, sulfur, sulfoxide, sulfonyl, carbonyl, and imine. In some embodiments, a linker may comprise one or more nucleic acids comprising one or more nucleotides. In some embodiments, the linker may comprise an amino acid, peptide, polypeptide or protein. In some embodiments, a moiety bound by a linker may include, but is not limited to an atom, a chemical group, a nucleoside, a nucleotide, a nucleobase, a sugar, a nucleic acid, an amino acid, a peptide, a polypeptide, a protein, a protein complex, a payload (e.g., a therapeutic agent), or a marker (including, but not limited to a chemical, fluorescent, radioactive or bioluminescent marker). The linker can be used for any useful purpose, such as to form multimers or conjugates, as well as to administer a payload, as described herein. Examples of chemical groups that can be incorporated into the linker include, but are not limited to, alkyl, alkenyl, alkynyl, amido, amino, ether, thioether, ester, alkylene, heteroalkylene, aryl, or heterocyclyl, each of which can be optionally substituted, as described herein. Examples of linkers include, but are not limited to, unsaturated alkanes, polyethylene glycols (e.g., ethylene or propylene glycol monomeric units, e.g., diethylene glycol, dipropylene glycol, triethylene glycol, tripropylene glycol, tetraethylene glycol, or tetraethylene glycol), and dextran polymers, Other examples include, but are not limited to, cleavable moieties within the linker, such as, for example, a disulfide bond (—S—S—) or an azo bond (—N═N—), which can be cleaved using a reducing agent or photolysis. Non-limiting examples of a selectively cleavable bonds include an amido bond which may be cleaved for example by the use of tris(2-carboxyethyl) phosphine (TCEP), or other reducing agents, and/or photolysis, as well as an ester bond which may be cleaved for example by acidic or basic hydrolysis.

[1153] Checkpoint/factor: As used herein, a checkpoint factor is any moiety or molecule whose function acts at the junction of a process. For example, a checkpoint protein, ligand or receptor may function to stall or accelerate the cell cycle.

[1154] Metabolite: Metabolites are the intermediate products of metabolic reactions catalyzed by enzymes that naturally occur within cells. This term is usually used to describe small molecules, fragments of larger biomolecules or processed products.

[1155] MOI: As used herein, the term “MOI” refers to the multiplicity of infection which is defined as the average number of virus particles infecting a target cell.

[1156] Modified: As used herein, the term “modified” refers to a changed state or structure of a molecule or entity as compared with a parent or reference molecule or entity. Molecules may be modified in many ways including chemically, structurally, and functionally. In some embodiments, compounds and/or compositions of the present invention are modified by the introduction of non-natural amino acids.

[1157] Mutation: As used herein, the term “mutation” refers to a change and/or alteration. In some embodiments, mutations may be changes and/or alterations to proteins (including peptides and polypeptides) and/or nucleic acids (including polynucleic acids). In some embodiments, mutations comprise changes and/or alterations to a protein and/or nucleic acid sequence. Such changes and/or alterations may comprise the addition, substitution and or deletion of one or more amino acids (in the case of proteins and/or peptides) and/or nucleotides (in the case of nucleic acids and or polynucleic acids, e.g., polynucleotides). In some embodiments, wherein mutations comprise the addition and/or substitution of amino acids and/or nucleotides, such additions and/or substitutions may comprise 1 or more amino acid and/or nucleotide residues and may include modified amino acids and/or nucleotides. The resulting construct, molecule or sequence of a mutation, change or alteration may be referred to herein as a mutant.

[1158] Neoantigen: the term “neoantigen”, as used herein, refers to a tumor antigen that is present in tumor cells but not normal cells and do not induce deletion of their cognate antigen specific T cells in thymus (i.e., central tolerance). These tumor neoantigens may provide a “foreign” signal, similar to pathogens, to induce an effective immune response needed for cancer immunotherapy. A neoantigen may be restricted to a specific tumor. A neoantigen be a peptide/protein with a missense mutation (missense neoantigen), or a new peptide with long, completely novel stretches of amino acids from novel open reading frames (neoORFs). The neoORFs can be generated in some tumors by out-of-frame insertions or deletions (due to defects in DNA mismatch repair causing microsatellite instability), gene-fusion, read-through mutations in stop codons, or translation of improperly spliced RNA (e.g., Saeterdal et al., Proc Natl Acad Sci USA, 2001, 98: 13255-13260).

[1159] Off-target: As used herein, “off target” refers to any unintended effect on any one or more target, gene, cellular transcript, cell, and/or tissue.

[1160] Operably linked: As used herein, the phrase “operably linked” refers to a functional connection between two or more molecules, constructs, transcripts, entities, moieties or the like.

[1161] Payload or payload of interest (POI): the terms “payload” and “payload of interest (POI)”, as used herein, are used interchangeable. A payload of interest (POI) refers to any protein or compound whose function is to be altered. In the context of the present invention, the POI is a component in the immune system, including both innate and adaptive immune systems. Payloads of interest may be a protein, a fusion construct encoding a fusion protein, or non-coding gene, or variant and fragment thereof. Payload of interest may, when amino acid based, may be referred to as a protein of interest.

[1162] Pharmaceutically acceptable excipients: the term “pharmaceutically acceptable excipient,” as used herein, refers to any ingredient other than active agents (e.g., as described herein) present in pharmaceutical compositions and having the properties of being substantially nontoxic and non-inflammatory in subjects. In some embodiments, pharmaceutically acceptable excipients are vehicles capable of suspending and/or dissolving active agents. Excipients may include, for example: antiadherents, antioxidants, binders, coatings, compression aids, disintegrants, dyes (colors), emollients, emulsifiers, fillers (diluents), film formers or coatings, flavors, fragrances, glidants (flow enhancers), lubricants, preservatives, printing inks, sorbents, suspending or dispersing agents, sweeteners, and waters of hydration. Exemplary excipients include, but are not limited to: butylated hydroxytoluene (BHT), calcium carbonate, calcium phosphate (dibasic), calcium stearate, croscarmellose, crosslinked polyvinyl pyrrolidone, citric acid, crospovidone, cysteine, ethylcellulose, gelatin, hydroxypropyl cellulose, hydroxypropyl methylcellulose, lactose, magnesium stearate, maltitol, mannitol, methionine, methylcellulose, methyl paraben, microcrystalline cellulose, polyethylene glycol, polyvinyl pyrrolidone, povidone, pregelatinized starch, propyl paraben, retinyl palmitate, shellac, silicon dioxide, sodium carboxymethyl cellulose, sodium citrate, sodium starch glycolate, sorbitol, starch (corn), stearic acid, sucrose, talc, titanium dioxide, vitamin A, vitamin E, vitamin C, and xylitol.

[1163] Pharmaceutically acceptable salts: Pharmaceutically acceptable salts of the compounds described herein are forms of the disclosed compounds wherein the acid or base moiety is in its salt form (e.g., as generated by reacting a free base group with a suitable organic acid). Examples of pharmaceutically acceptable salts include, but are not limited to, mineral or organic acid salts of basic residues such as amines; alkali or organic salts of acidic residues such as carboxylic acids; and the like. Representative acid addition salts include acetate, adipate, alginate, ascorbate, aspartate, benzenesulfonate, benzoate, bisulfate, borate, butyrate, camphorate, camphorsulfonate, citrate, cyclopentanepropionate, digluconate, dodecylsulfate, ethanesulfonate, fumarate, glucoheptonate, glycerophosphate, hemisulfate, heptonate, hexanoate, hydrobromide, hydrochloride, hydroiodide, 2-hydroxy-ethanesulfonate, lactobionate, lactate, laurate, lauryl sulfate, malate, maleate, malonate, methanesulfonate, 2-naphthalenesulfonate, nicotinate, nitrate, oleate, oxalate, palmitate, pamoate, pectinate, persulfate, 3-phenylpropionate, phosphate, picrate, pivalate, propionate, stearate, succinate, sulfate, tartrate, thiocyanate, toluenesulfonate, undecanoate, valerate salts, and the like. Representative alkali or alkaline earth metal salts include sodium, lithium, potassium, calcium, magnesium, and the like, as well as nontoxic ammonium, quaternary ammonium, and amine cations, including, but not limited to ammonium, tetramethylammonium, tetraethylammonium, methylamine, dimethylamine, trimethylamine, triethylamine, ethylamine, and the like. Pharmaceutically acceptable salts include the conventional non-toxic salts, for example, from non-toxic inorganic or organic acids. In some embodiments, a pharmaceutically acceptable salt is prepared from a parent compound which contains a basic or acidic moiety by conventional chemical methods. Generally, such salts can be prepared by reacting the free acid or base forms of these compounds with a stoichiometric amount of the appropriate base or acid in water or in an organic solvent, or in a mixture of the two; generally, nonaqueous media like ether, ethyl acetate, ethanol, isopropanol, or acetonitrile are preferred. Lists of suitable salts are found in Remington's Pharmaceutical Sciences, 17th ed., Mack Publishing Company, Easton, Pa., 1985, p. 1418, Pharmaceutical Salts: Properties, Selection, and Use, P. H. Stahl and C. G. Wermuth (eds.), Wiley-VCH, 2008, and Berge et al., Journal of Pharmaceutical Science, 66, 1-19 (1977), each of which is incorporated herein by reference in its entirety. Pharmaceutically acceptable solvate: The term “pharmaceutically acceptable solvate,” as used herein, refers to a crystalline form of a compound wherein molecules of a suitable solvent are incorporated in the crystal lattice. For example, solvates may be prepared by crystallization, recrystallization, or precipitation from a solution that includes organic solvents, water, or a mixture thereof. Examples of suitable solvents are ethanol, water (for example, mono-, di-, and tri-hydrates), N-methylpyrrolidinone (NMP), dimethyl sulfoxide (DMSO), N, N′-dimethylformamide (DMF), N, N′-dimethylacetamide (DMAC), 1,3-dimethyl-2-imidazolidinone (DMEU), 1,3-dimethyl-3,4,5,6-tetrahydro-2-(1H)-pyrimidinone (DMPU), acetonitrile (ACN), propylene glycol, ethyl acetate, benzyl alcohol, 2-pyrrolidone, benzyl benzoate, and the like. When water is the solvent, the solvate is referred to as a “hydrate.” In some embodiments, the solvent incorporated into a solvate is of a type or at a level that is physiologically tolerable to an organism to which the solvate is administered (e.g., in a unit dosage form of a pharmaceutical composition).

[1164] Protein of interest: As used herein, the terms “proteins of interest” or “desired proteins” include those provided herein and fragments, mutants, variants, and alterations thereof.

[1165] Purine: As used herein, “purine” refers to an aromatic heterocyclic structure, wherein one of the heterocycles is an imidazole ring and one of the heterocycles is a pyrimidine ring.

[1166] Pyrimidine: As used herein, “pyrimidine” refers to an aromatic heterocyclic structure similar to benzene, but wherein two of the carbon atoms are replaced by nitrogen atoms.

[1167] Pyridopyrimidine: As used herein, “Pyridopyrimidine” refers to an aromatic heterocyclic structure, wherein one of the heterocycles is a purine ring and one of the heterocycles is a pyrimidine ring.

[1168] Quinazoline: As used herein, the term, “Quinazoline” refers to an aromatic heterocyclic structure, wherein one of the heterocycles is a benzene ring and one of the heterocycles is a pyrimidine ring.

[1169] Standard CAR: As used herein, the term “standard CAR” refers to the standard design of a chimeric antigen receptor. The components of a CAR fusion protein including the extracellular scFv fragment, transmembrane domain and one or more intracellular domains are linearly constructed as a single fusion protein.

[1170] Stable: As used herein “stable” refers to a compound or entity that is sufficiently robust to survive isolation to a useful degree of purity from a reaction mixture, and preferably capable of formulation into an efficacious therapeutic agent.

[1171] Stabilized: As used herein, the term “stabilize”, “stabilized,” “stabilized region” means to make or become stable. In some embodiments, stability is measured relative to an absolute value. In some embodiments, stability is measured relative to a secondary status or state or to a reference compound or entity.

[1172] Stimulus response element (SRE): the term “stimulus response element (SRE), as used herein, is a component of an effector module which is joined, attached, linked to or associated with one or more payloads of the effector module and in some instances, is responsible for the responsive nature of the effector module to one or more stimuli. As used herein, the “responsive” nature of an SRE to a stimulus may be characterized by a covalent or non-covalent interaction, a direct or indirect association or a structural or chemical reaction to the stimulus. Further, the response of any SRE to a stimulus may be a matter of degree or kind. The response may be a partial response. The response may be a reversible response. The response may ultimately lead to a regulated signal or output. Such output signal may be of a relative nature to the stimulus, e.g., producing a modulatory effect of between 1 and 100 or a factored increase or decrease such as 2-fold, 3-fold, 4-fold, 5-fold, 10-fold or more. One non-limiting example of an SRE is a destabilizing domain (DD).

[1173] Subject: As used herein, the term “subject” or “patient” refers to any organism to which a composition in accordance with the invention may be administered, e.g., for experimental, diagnostic, prophylactic, and/or therapeutic purposes. Typical subjects include animals (e.g., mammals such as mice, rats, rabbits, non-human primates, and humans) and/or plants.

[1174] T cell: A T cell is an immune cell that produces T cell receptors (TCRs). T cells can be naïve (not exposed to antigen; increased expression of CD62L, CCR7, CD28, CD3, CD127, and CD45RA, and decreased expression of CD45RO as compared to T_{CM}), memory T cells (T_{M}) (antigen-experienced and long-lived), and effector cells (antigen-experienced, cytotoxic). T_{M} can be further divided into subsets of central memory T cells (T_{CM}, increased expression of CD62L, CCR7, CD28, CD127, CD45RO, and CD95, and decreased expression of CD54RA as compared to naïve T cell and effector memory T cells (TEM, decreased expression of CD62L, CCR7, CD28, CD45RA, and increased expression of CD127 as compared to naïve T cells or T_{CM}). Effector T cells (T_{E}) refers to antigen-experienced CD8+ cytotoxic T lymphocytes that have decreased expression of CD62L, CCR7, CD28, and are positive for granzyme and perforin as compared to T_{CM}. Other exemplary T cells include regulatory T cells, such as CD4+CD25+(Foxp3+) regulatory T cells and Treg17 cells, as well as Tr1, Th3, CD8+CD28−, and Qa-1 restricted T cells.

[1175] T cell receptor: T cell receptor (TCR) refers to an immunoglobulin superfamily member having a variable antigen binding domain, a constant domain, a transmembrane region, and a short cytoplasmic tail, which is capable of specifically binding to an antigen peptide bound to a MHC receptor. A TCR can be found on the surface of a cell or in soluble form and generally is comprised of a heterodimer having α and β chains (also known as TCRα and TCRβ, respectively), or γ and δ chains (also known as TCRγ and TCRδ, respectively). The extracellular portion of TCR chains (e.g., α-chain, β-chain) contains two immunoglobulin domains, a variable domain (e.g., α-chain variable domain or V_{α}, β-chain variable domain or V_{β}) at the N-terminus, and one constant domain (e.g., α-chain constant domain or C_{α} and β-chain constant domain or C_{β}) adjacent to the cell membrane. Similar to immunoglobulin, the variable domains contain complementary determining regions (CDRs) separated by framework regions (FRs). A TCR is usually associated with the CD3 complex to form a TCR complex. As used herein, the term “TCR complex” refers to a complex formed by the association of CD3 with TCR. For example, a TCR complex can be composed of a CD3γ chain, a CD3δ chain, two CD3ε chains, a homodimer of CD3ζ chains, a TCRα chain, and a TCRβ chain. Alternatively, a TCR complex can be composed of a CD3γ chain, a CD3δ chain, two CD3ε chains, a homodimer of CD3ζ chains, a TCRγ chain, and a TCRδ chain. A “component of a TCR complex,” as used herein, refers to a TCR chain (i.e., TCRα, TCRβ, TCRγ or TCRδ), a CD3 chain (i.e., CD3γ, CD3δ, CD3ε or CD3ζ), or a complex formed by two or more TCR chains or CD3 chains (e.g., a complex of TCRα and TCRβ, a complex of TCRγ and TCRδ, a complex of CD3ε and CD3δ, a complex of CD3γ and CD3ε, or a sub-TCR complex of TCRα, TCRβ, CD3γ, CD3δ, and two CD3ε chains.

[1176] Therapeutic Agent: The term “therapeutic agent” refers to any agent that, when administered to a subject, has a therapeutic, diagnostic, and/or prophylactic effect and/or elicits a desired biological and/or pharmacological effect. Therapeutic agents of the present invention include any of the biocircuit components taught herein either alone or in combination with other therapeutic agents.

[1177] Therapeutically effective amount: As used herein, the term “therapeutically effective amount” means an amount of an agent to be delivered (e.g., nucleic acid, drug, therapeutic agent, diagnostic agent, prophylactic agent, etc.) that is sufficient, when administered to a subject suffering from or susceptible to an infection, disease, disorder, and/or condition, to treat, improve symptoms of, diagnose, prevent, and/or delay the onset of the infection, disease, disorder, and/or condition. In some embodiments, a therapeutically effective amount is provided in a single dose. In some embodiments, a therapeutically effective amount is administered in a dosage regimen comprising a plurality of doses. Those skilled in the art will appreciate that in some embodiments, a unit dosage form may be considered to comprise a therapeutically effective amount of a particular agent or entity if it comprises an amount that is effective when administered as part of such a dosage regimen.

[1178] Triazine: As used herein, “triazine” is a class of nitrogen containing heterocycles with a structure similar to benzene, but wherein three carbon atoms are replaced by nitrogen atoms.

[1179] Treatment or treating: As used herein, the terms “treatment” or “treating” denote an approach for obtaining a beneficial or desired result including and preferably a beneficial or desired clinical result. Such beneficial or desired clinical results include, but are not limited to, one or more of the following: reducing the proliferation of (or destroying) cancerous cells or other diseased, reducing metastasis of cancerous cells found in cancers, shrinking the size of the tumor, decreasing symptoms resulting from the disease, increasing the quality of life of those suffering from the disease, decreasing the dose of other medications required to treat the disease, delaying the progression of the disease, and/or prolonging survival of individuals.

[1180] Tune: As used herein, the term “tune” means to adjust, balance or adapt one thing in response to a stimulus or toward a particular outcome. In one non-limiting example, the SREs and/or DDs of the present invention adjust, balance or adapt the function or structure of compositions to which they are appended, attached or associated with in response to particular stimuli and/or environments.

[1181] Variant: As used herein, the term “variant” refers to a first composition (e.g., a first DD or payload), that is related to a second composition (e.g., a second DD or payload, also termed a “parent” molecule). The variant molecule can be derived from, isolated from, based on or homologous to the parent molecule. The term variant can be used to describe either polynucleotides or polypeptides.

### EQUIVALENTS AND SCOPE

[1182] Those skilled in the art will recognize, or be able to ascertain using no more than routine experimentation, many equivalents to the specific embodiments in accordance with the invention described herein. The scope of the present invention is not intended to be limited to the above Description, but rather is as set forth in the appended claims.

[1183] In the claims, articles such as “a,” “an,” and “the” may mean one or more than one unless indicated to the contrary or otherwise evident from the context. Claims or descriptions that include “or” between one or more members of a group are considered satisfied if one, more than one, or all of the group members are present in, employed in, or otherwise relevant to a given product or process unless indicated to the contrary or otherwise evident from the context. The invention includes embodiments in which exactly one member of the group is present in, employed in, or otherwise relevant to a given product or process. The invention includes embodiments in which more than one, or the entire group members are present in, employed in, or otherwise relevant to a given product or process.

[1184] It is also noted that the term “comprising” is intended to be open and permits but does not require the inclusion of additional elements or steps. When the term “comprising” is used herein, the term “consisting of” is thus also encompassed and disclosed.

[1185] Where ranges are given, endpoints are included. Furthermore, it is to be understood that unless otherwise indicated or otherwise evident from the context and understanding of one of ordinary skill in the art, values that are expressed as ranges can assume any specific value or subrange within the stated ranges in different embodiments of the invention, to the tenth of the unit of the lower limit of the range, unless the context clearly dictates otherwise.

[1186] In addition, it is to be understood that any particular embodiment of the present invention that falls within the prior art may be explicitly excluded from any one or more of the claims. Since such embodiments are deemed to be known to one of ordinary skill in the art, they may be excluded even if the exclusion is not set forth explicitly herein. Any particular embodiment of the compositions of the invention (e.g., any antibiotic, therapeutic or active ingredient; any method of production; any method of use; etc.) can be excluded from any one or more claims, for any reason, whether or not related to the existence of prior art.

[1187] It is to be understood that the words which have been used are words of description rather than limitation, and that changes may be made within the purview of the appended claims without departing from the true scope and spirit of the invention in its broader aspects.

### EXAMPLES

### Example 1. Generation of Novel Ligand Responsive SREs or DDs by Mutagenesis Screening

### Study Design

[1188] To engineer constructs that display ligand dependent stability, a candidate ligand binding domain (LBD) is selected and a cell-based screen using yellow fluorescent protein (YFP) as a reporter for protein stability is designed to identify mutants of the candidate LBD possessing the desired characteristics of a destabilizing domain: low protein levels in the absence of a ligand of the LBD, (i.e., low basal stability), large dynamic range, robust and predictable dose-response behavior, and rapid kinetics of degradation (Banaszynski, et al., (2006) Cell; 126(5): 995-1004). The candidate LBD binds to a desired ligand but not endogenous signaling molecules.

[1189] The candidate LBD sequence (as a template) is first mutated using a combination of nucleotide analog mutagenesis and error-prone PCR, to generate libraries of mutants based on the template candidate domain sequence. The libraries generated are cloned in-frame at either the 5′- or 3′-ends of the YFP gene, and a retroviral expression system is used to stably transduce the libraries of YFP fusions into NIH3T3 fibroblasts.

[1190] The transduced NIH3T3 cells are subjected to three to four rounds of sorting using fluorescence-activated cell sorting (FACS) to screen the libraries of candidate DDs. Transduced NIH3T3 cells are cultured in the absence of the high affinity ligand of the ligand binding domain (LBD), and cells that exhibit low levels of YFP expression are selected through FACS.

### Screening Strategy I

[1191] The selected cell population is cultured in the presence of the high affinity ligand of the ligand binding domain for a period of time (e.g., 24 hours), at which point cells are sorted again by FACS. Cells that exhibit high levels of YFP expression are selected through FACS and the selected cell population is split into two groups and treated again with the high affinity ligand of the ligand binding domain at different concentrations; one group is treated with the lower concentration of the ligand and the other is treated with a high concentration of the ligand, for a period of time (e.g., 24 hours), at which point cells are sorted again by FACS. Cells expressing mutants that are responsive to lower concentrations of the ligand are isolated.

[1192] The isolated cells responsive to the lower concentration of the ligand are treated with the ligand again and cells exhibiting low fluorescence levels are collected 4 hours following removal of the ligand from the media. This fourth sorting is designed to enrich cells that exhibit fast kinetics of degradation (Iwamoto et al., Chem Biol. 2010 Sep. 24; 17(9): 981-988).

### Screening Strategy II

[1193] The selected cell population is subject to additional one or more sorts by FACS in the absence of high affinity ligand of LBD and cells that exhibit low levels of YFP expression are selected for further analysis. Cells are treated with high affinity ligand of the ligand binding domain, for a period of time (e.g. 24 hours), and sorted again by FACS. Cells expressing high levels of YFP are selected for through FACS. Cells with high expression of YFP are treated with ligand again and cells exhibiting low fluorescence levels are collected 4 hours following removal of the ligand from the media to enrich cells that exhibit fast kinetics of degradation. Any of the sorting steps may be repeated to identify DDs with ligand dependent stability.

[1194] The cells are recovered after sorting. The identified candidate cells are harvested and the genomic DNA is extracted. The candidate DDs are amplified by PCR and isolated. The candidate DDs are sequenced and compared to the LBD template to identify the mutations in candidate DDs.

### Example 2. Novel DDs Derived from Human DHFR by Site Directed Mutagenesis

[1195] Known destabilizing mutations in E. coli DHFR (ecDHFR) were mapped onto the structure of human DHFR (hDHFR) and corresponding mutations in wild type hDHFR protein were generated using site directed mutagenesis. hDHFR mutants were then fused to a linker, GGSGGG (SEQ ID NO: 2728) and a GFP reporter gene at the N terminus. The stability of the mutants in response to TMP and MTX was tested. The hDHFR N terminus mutant construct cloned into pLVX. IRES. The reporter constructs were transfected into NIH 3T3 cells. Transfected cells were incubated with either 1 μM MTX or 10 μM TMP for 48 hours. DMSO was used as control. Fluorescence signal was measured by FACS and median fluorescence signal intensity was calculated. Median fluorescence intensity following DMSO treatment are shown in Table 44. The destabilizing mutation co-efficient was calculated as the fold change in GFP intensity in the hDHFR mutant constructs compared to the hDHFR (WT) in the absence of the ligand. Destabilizing mutation co-efficients less than 1 are desired in DDs.

TABLE 44
hDHFR mutants without ligand

| | Median | |
|---|---|---|
| | Fluorescence | Destabilizing |
| | signal with | mutation co- |
| Construct | DMSO | efficient |
| NIH-3T3 cells (Control) | 1.78 | — |
| OT-hDHFRN-001 (hDHFR WT) | 18 | — |
| OT-hDHFRN-002 (hDHFR Y122I) | 4.67 | 0.26 |
| OT-hDHFRN-003 (hDHFR M53T, R138I) | 2.29 | 0.13 |
| OT-hDHFRN-004 (hDHFR V75F, Y122I) | 2.43 | 0.14 |
| OT-hDHFRN-005 (hDHFR A125F, Y122I) | 2.55 | 0.14 |
| OT-hDHFRN-021 (hDHFR V121A, Y122I) | 2.83 | 0.16 |
| OT-hDHFRN-006 (hDHFR L74N, Y122I) | 2.94 | 0.16 |
| OT-hDHFRN-007 (hDHFR L94A, T147A) | 2.67 | 0.15 |
| OT-hDHFRN-008 (hDHFR G21T, Y122I) | 3.27 | 0.18 |

[1196] The median florescence intensity of all human DHFR mutants was comparable to the parental untransfected cells. OT-hDHFRN-003 (hDHFR M53T, R138I) and OT-hDHFRN-004 (hDHFR V75F, Y122I) showed the lowest median fluorescence intensity among the mutants tested. As expected, the median fluorescence intensity observed with the hDHFR wildtype (OT-hDHFRN-001) was much higher than the hDHFR mutants as well as the control cells. A destabilizing mutation co-efficient less than one was observed with all hDHFR mutant constructs. These results show that the hDHFR mutants tested show low basal stability in the absence of ligand.

[1197] To test if the low fluorescence intensity observed with the hDHFR mutants is indeed due to destabilization, the fluorescence intensity following MTX or TMP treatment was measured and compared with the control DMSO. Table 45 shows fold change in median GFP intensity in ligand treated hDHFR mutants when compared to DMSO.

TABLE 45
GFP intensity with ligand treatment

| | Fold Change | |
|---|---|---|
| | 1 μM | 10 μM |
| Construct | MTX | TMP |
| NIH-3T3 cells (Control) | 1.31 | 0.88 |
| OT-hDHFRN-001 (hDHFR WT) | 6.78 | 4.68 |
| OT-hDHFRN-002 (hDHFR Y122I) | 14.41 | 11.46 |
| OT-hDHFRN-003 (hDHFR M53T, R138I) | 3.36 | 1.02 |
| OT-hDHFRN-004 (hDHFR V75F, Y122I) | 4.00 | 1.02 |
| OT-hDHFRN-005 (hDHFR A125F, Y122I) | 26.98 | 6.24 |
| OT-hDHFRN-021 (hDHFR V121A, Y122I) | 15.58 | 1.58 |
| OT-hDHFRN-006 (hDHFR L74N, Y122I) | 8.30 | 1.03 |
| OT-hDHFRN-007 (hDHFR L94A, T147A) | 4.46 | 1.00 |
| OT-hDHFRN-008 (hDHFR G21T, Y122I) | 14.53 | 1.30 |

[1198] As shown in the Table 45, hDHFR Y122I (OT-hDHFRN-002), hDHFR A125F, and Y122I (OT-hDHFRN-005) showed a fold change increase in GFP intensity with MTX and TMP, suggesting a MTX and TMP dependent stabilization of the DD. The rest of the mutants showed an increase in GFP only with MTX suggesting hDHFR stabilization only with MTX treatment.

[1199] Percentage of GFP positive cells as a measure of ligand dependent DD stabilization in each transfection was calculated using FACS Calibur™ (see Table 46).

TABLE 46
hDHFR mutants with ligand

| | % GFP positive cells | | |
|---|---|---|---|
| | | 1 μM | 10 μM |
| Construct | DMSO | MTX | TMP |
| NIH-3T3 cells (Control) | 0.03 | 0.18 | 0.04 |
| OT-hDHFRN-001 (hDHFR WT) | 61.5 | 96 | 97.2 |
| OT-hDHFRN-002 (hDHFR Y122I) | 5.34 | 92.5 | 91.2 |
| OT-hDHFRN-003 (hDHFR M53T, R138I) | 0.55 | 22.3 | 0.97 |
| OT-hDHFRN-004 (hDHFR V75F, Y122I) | 0.5 | 33.7 | 0.39 |
| OT-hDHFRN-005 (hDHFR A125F, Y122I) | 0.64 | 89.6 | 54.7 |
| OT-hDHFRN-021 (hDHFR V121A, Y122I) | 0.85 | 83.8 | 5.54 |
| OT-hDHFRN-006 (hDHFR L74N, Y122I) | 0.93 | 72 | 0.72 |
| OT-hDHFRN-007 (hDHFR L94A, T147A) | 0.26 | 40.7 | 0.52 |
| OT-hDHFRN-008 (hDHFR G21T, Y122I) | 0.61 | 86.6 | 2.92 |

[1200] As shown in the Table 46, the percentage of GFP positive cells in the hDHFR mutants was low with DMSO treatment and comparable to the control cells. The wildtype hDHFR (OT-hDHFRN-001) showed a high percentage of GFP positive cells with DMSO treatment. To test if the low percentage of GFP positive cells in the hDHFR mutants was due to destabilization in the absence of ligand, cells were treated with stabilizing ligands i.e. 1 μM MTX or 10 μM TMP. OT-hDHFRN-002 (hDHFR Y122I), OT-hDHFRN-005 (hDHFR A125F, Y122I) and OT-hDHFRN-021 (hDHFR V121A, Y122I) showed an increase in the percentage of GFP positive cells indicating a ligand dependent stabilization. OT-DHFRN-003, OT-DHFRN-004, OT-DHFRN-006 OT-DHFRN-007 and OT-DHFRN-008 showed MTX specific stabilization as indicated by the increase in the percentage of GFP positive cells following MTX treatment.

[1201] The stability of hDHFR mutants was also evaluated at the protein level. hDHFR WT and mutants (hDHFR(Y122I), hDHFR (M53T, R138I), hDHFR (V75F, Y122I), hDHFR (A125F, Y122I), hDHFR (V121A, Y122I), hDHFR (L74N, Y122I), hDHFR (L94A, T147A), hDHFR (G21T, Y122I) were immunoblotted after TMP or MTX or DMSO treatment for 48 hours. Anti-AcGFP antibody (Clonetech, Mountain View, CA) and anti-hDHFR antibody (GeneTex Cat. NO. GTX117705) were used for western blotting. As shown in FIG. 19A-FIG. 19F, the protein levels of hDHFR mutants, hDHFR(Y122I), hDHFR (A125F, Y122I) and hDHFR (V121A, Y122I) were stabilized following treatment with both MTX and TMP. hDHFR mutants including OT-DHFRN-006 OT-DHFRN-007 and OT-DHFRN-008 showed stabilization exclusively with MTX. Wild type hDHFR showed enhanced stabilization upon addition of MTX and TMP. The results were consistent using both the AcGFP antibody as well as the hDHFR antibody.

### Example 3. Novel DDs Derived from Human DHFR by Random Mutagenesis

[1202] To identify novel destabilizing domain mutations, mutagenic PCR was performed on human DHFR open reading frame using forward primer (MutCP-For: GAATTCCTCGAGGCCACCATG (with XhoI site)(SEQ ID NO. 6411)) and reverse primer (MutCP-Rev: CCACCAGAGCCACCACTAGT (with SpeI site)(SEQ ID NO. 6412)) using non-natural nucleotides. The mutant library was ligated in frame with an AcGFP reporter at the C-terminus into pLVX-IRES-Puro vector and packaged into lentivirus. The lentivirus library was then used to infect HEK293T cells at multiplicity of infection (MOI) of 0.3. Stably transduced cells were selected with puromycin. Cells were then treated with 1 μM Methotrexate or 10 μM Trimethoprim for 48 hrs. Following ligand treatment, cells showing >95% median fluorescence intensity GFP were sorted by FACS. The sorted population was treated with 1 μM Methotrexate or 10 μM Trimethoprim for 48 hours and cells showing >95% median fluorescence intensity were sorted again. The cells were passaged for a few generations following the sort and cells showing <5% median fluorescence intensity in the absence of ligand were sorted again. Cells were treated with 1 μM Methotrexate or 10 μM Trimethoprim for 48 hours and cells showing >95% median fluorescence intensity were selected. DNA was extracted from the cell pool, the DHFR locus was PCR amplified and sequenced. Clone C1-12 3 provides the sequence identity of the clones generated by error prone PCR based mutagenesis. The sequence confirmed clones were ligated in frame to AcGFP reporter at the C-terminus into pLVX-IRES-Puro and transformed into E. coli. Individual clones were sequenced and packaged into lentivirus. HEK293 cells were transduced with the lentivirus and stable integrants were selected with puromycin. Cells expressing individual clones were then incubated with vehicle, Dimethylsulfoxide (DMSO), 10 or 50 μM Trimethoprim or 1 μM Methotrexate. Median GFP fluorescence was quantified using FACS and the results from various experiments are presented in Tables 47-50. The stabilization ratio was calculated as the fold change in GFP intensity in ligand treated samples compared to treatment with DMSO (i.e. in the absence of ligand) with the same construct. The destabilizing mutation co-efficient was calculated as the fold change in GFP intensity in the DHFR mutant constructs in the absence of the ligand compared to the wildtype DHFR construct. Destabilizing mutation co-efficient less than 1 and stabilization ratios greater than 1 are desired in DDs.

TABLE 47
Ligand dependent hDHFR mutant expression

| | Median | | | De- | | |
|---|---|---|---|---|---|---|
| | fluorescence | | | stabilizing | Stabilization | |
| | intensity | | | mutation | Ratio | |
| | | 10 μM | 1 μM | co- | 10 μM | 1 μM |
| hDHFR mutant | DMSO | TMP | MTX | efficient | TMP | MTX |
| hDHFR (WT) | 83.6 | 398 | 459 | — | 4.76 | 5.49 |
| Clone C1-12 | 254 | 1411 | 1625 | 3.04 | 5.56 | 6.40 |
| (hDHFR | | | | | | |
| (K81R)) | | | | | | |
| Clone C1-18 | 6.37 | 6.6 | 353 | 0.08 | 1.04 | 55.42 |
| (hDHFR (V9A, | | | | | | |
| S93R, P150L)) | | | | | | |
| Clone C1-4 | 6.08 | 107 | 1380 | 0.07 | 17.60 | 226.97 |
| (hDHFR | | | | | | |
| (F59S)) | | | | | | |
| Clone C1-8 | 19.6 | 605 | 1624 | 0.23 | 30.87 | 82.86 |
| (hDHFR | | | | | | |
| (I17V)) | | | | | | |
| Clone C1-11 | 334 | 1100 | 1000 | 4.00 | 3.29 | 2.99 |
| (hDHFR | | | | | | |
| (N65D)) | | | | | | |
| Clone C2-21 | 1.66 | 1.64 | 211 | 0.02 | 0.99 | 127.11 |
| (hDHFR | | | | | | |
| (A10V, | | | | | | |
| H88Y)) | | | | | | |

TABLE 48
Ligand dependent hDHFR mutant expression

| | Median | | | De- | | |
|---|---|---|---|---|---|---|
| | fluorescence | | | stabilizing | Stabilization | |
| | intensity | | | mutation | Ratio | |
| hDHFR | | 50 μM | 1 μM | co- | 10 μM | 1 μM |
| mutant | DMSO | TMP | MTX | efficient | TMP | MTX |
| hDHFR WT | 399 | 2507 | 2033 | — | 6.28 | 5.10 |
| Clone C1-3 | 79.7 | 947 | 859 | 0.20 | 11.88 | 10.78 |
| (hDHFR | | | | | | |
| (A107V)) | | | | | | |
| Clone C1-10 | 6.84 | 7.36 | 13 | 0.02 | 1.08 | 1.90 |
| (hDHFR | | | | | | |
| (C7R, | | | | | | |
| Y163C)) | | | | | | |
| Clone C1-14 | 12.8 | 1023 | 1197 | 0.03 | 79.92 | 93.52 |
| (hDHFR | | | | | | |
| (N127Y)) | | | | | | |
| Clone C1-21 | 3.96 | 427 | 1267 | 0.01 | 107.83 | 319.95 |
| (hDHFR | | | | | | |
| (K185E)) | | | | | | |
| Clone C1-25 | 4.03 | 4.42 | 4.9 | 0.01 | 1.10 | 1.22 |
| (hDHFR | | | | | | |
| (T137R, | | | | | | |
| F143L)) | | | | | | |
| Clone C2-8 | 3.81 | 3.41 | 116 | 0.01 | 0.90 | 30.45 |
| (hDHFR | | | | | | |
| (I8V, K133E, | | | | | | |
| Y163C)) | | | | | | |
| Clone C2-15 | 3.61 | 4.21 | 504 | 0.01 | 1.17 | 139.61 |
| (hDHFR | | | | | | |
| (K19E, | | | | | | |
| F89L, | | | | | | |
| E181G)) | | | | | | |
| Clone C2-20 | 109 | 948 | 897 | 0.27 | 8.70 | 8.23 |
| (hDHFR | | | | | | |
| (N186D)) | | | | | | |
| Clone C2-22 | 2.69 | 2.81 | 3.44 | 0.01 | 1.04 | 1.28 |
| (hDHFR | | | | | | |
| (G54R, | | | | | | |
| M140V, | | | | | | |
| S168C)) | | | | | | |
| Clone C2-23 | 3.33 | 4.5 | 307 | 0.01 | 1.35 | 92.19 |
| (hDHFR | | | | | | |
| (L23S, | | | | | | |
| V121A, | | | | | | |
| Y157C)) | | | | | | |

TABLE 49
Ligand dependent hDHFR mutant expression

| | Median | | | De- | | |
|---|---|---|---|---|---|---|
| | fluorescence | | | stabilizing | Stabilization | |
| | intensity | | | mutation | Ratio | |
| hDHFR | | 50 μM | 1 μM | co- | 10 μM | 1 μM |
| mutant | DMSO | TMP | MTX | efficient | TMP | MTX |
| hDHFR WT | 253 | 1560 | 1296 | — | 6.17 | 5.12 |
| Clone C1-24 | 3.62 | 51.2 | 1010 | 0.01 | 14.14 | 279.01 |
| (hDHFR | | | | | | |
| (V110A, | | | | | | |
| V136M, | | | | | | |
| K177R)) | | | | | | |
| Clone C2-25 | 5.24 | 564 | 1487 | 0.02 | 107.63 | 283.78 |
| (hDHFR | | | | | | |
| (E162G, | | | | | | |
| I176F)) | | | | | | |
| Clone C3-1 | 3.52 | 4.1 | 315 | 0.01 | 1.16 | 89.49 |
| (hDHFR | | | | | | |
| (Y178H, | | | | | | |
| E181G)) | | | | | | |
| Clone C3-2 | 5.26 | 6.49 | 31.2 | 0.02 | 1.23 | 5.93 |
| (hDHFR | | | | | | |
| (N49D, F595, | | | | | | |
| D153G)) | | | | | | |
| hDHFR | 18.4 | 1661 | 1946 | 0.07 | 90.27 | 105.76 |
| (M140I) | | | | | | |
| Clone C3-9 | 13.3 | 1332 | 2005 | 0.05 | 100.15 | 150.75 |
| (hDHFR | | | | | | |
| (H131R, | | | | | | |
| E144G)) | | | | | | |
| Clone C3-22 | 5.71 | 7.28 | 714 | 0.02 | 1.27 | 125.04 |
| (hDHFR | | | | | | |
| (T57A, | | | | | | |
| I72A)) | | | | | | |

TABLE 50
Ligand dependent hDHFR mutant expression

| | Median | | | De- | | |
|---|---|---|---|---|---|---|
| | fluorescence | | | stabilizing | Stabilization | |
| | intensity | | | mutation | Ratio | |
| | | 50 μM | 1 μM | co- | 10 μM | 1 μM |
| hDHFR mutant | DMSO | TMP | MTX | efficient | TMP | MTX |
| hDHFR WT | 114 | 943 | 844 | — | 8.27 | 7.40 |
| Clone C3-10 | 2.03 | 2.11 | 242 | 0.02 | 1.04 | 119.21 |
| (hDHFR | | | | | | |
| (Y183H, | | | | | | |
| K185E)) | | | | | | |
| Clone C4-3 | 2.34 | 2.57 | 443 | 0.02 | 1.10 | 189.32 |
| (hDHFR (G21E, | | | | | | |
| I72V, I176T)) | | | | | | |

[1203] Based on the results presented in Tables 47-50, the hDHFR mutants can be classified into four groups with reference to GFP intensity with DMSO or ligand treatment as compared to the wildtype as well as their stabilization and destabilizing mutation co-efficient s. One group of hDHFR mutants showed low GFP intensity compared to WT with DMSO treatment and high GFP intensity with both MTX and TMP treatment suggesting that the mutants are destabilized in the absence of ligand, but are stabilized in the presence of both ligands. Mutants that showed this behavior include Clone C1-4(hDHFR(F59S)), Clone C1-8 (hDHFR (I17V)), Clone C1-3 (hDHFR (A107V)), Clone C1-14 (hDHFR (N127Y), Clone C1-21(hDHFR (K185E)), Clone C2-20 (hDHFR (N186D)), Clone C1-24 (hDHFR (V110A, V136M, K177R)), Clone C2-25 (hDHFR (E162G, I176F)), Clone C3-3 (hDHFR (M140I)), and Clone C3-9 (hDHFR (H131R, E144G)). Among these mutants, Clone C3-3 (hDHFR (M140I)), and Clone C1-21(hDHFR (K185E)) also showed low GFP expression levels with DMSO treatment at levels comparable to the parental untransfected NIH3T3 cells indicating a high degree of destabilization in the absence of ligand of mutants showed low GFP intensity. Another group of hDHFR mutants showed low GFP intensity compared to WT with DMSO treatment and high GFP intensity only with MTX but not TMP, suggesting that the mutants are destabilized in the absence of MTX, but are stabilized in the presence of MTX. Mutants that showed MTX dependent stability include Clone C1-18 (hDHFR (V9A, S93R, P150L)), Clone C2-21(hDHFR (A10V, H88Y)), Clone C2-8 (hDHFR (I8V, K133E, Y163C)), Clone C2-15 (hDHFR (K19E, F89L, E181G)), Clone C2-8 (hDHFR (I8V, K133E, Y163C)), Clone C2-15 (hDHFR (K19E, F89L, E181G)), Clone C3-1(hDHFR (Y178H, E181G)), Clone C3-22 (hDHFR (T57A, I72A)), Clone C3-10 (hDHFR (Y183H, K185E)), and Clone C4-3 (hDHFR (G21E, I72V, I176T)). A third behavior observed in some of the hDHFR mutants included low GFP expression with DMSO treatment and no subsequent increase in GFP intensity with MTX or TMP treatment indicating that the mutations may be severely destabilizing. hDHFR mutants that were only destabilized include Clone C1-10 (hDHFR (C7R, Y163C)), Clone C1-25 (hDHFR (T137R, F143L)), Clone C2-22 (hDHFR (G54R, I115L, M140V, S168C)), Clone C2-23 (hDHFR (L23S, V121A, Y157C)), and Clone C3-2(hDHFR (N49D, F59S, D153G)). A fourth group of hDHFR mutants showed GFP expression levels with DMSO treatment that was comparable to the wildtype DHFR, with a further increase in GFP intensity with TMP and MTX treatment suggesting that these mutations were only capable of stabilizing hDHFR. Examples of stabilizing mutants include Clone C1-11 (hDHFR (N65D)), and Clone C1-12 (hDHFR(K81R)).

### Example 4. hDHFR C Terminus Fusion Proteins

[1204] DDs may be positioned upstream or downstream of the payload within an SRE. hDHFR mutants generated by structure guided mutagenesis as discussed in example 2 were fused at the C-terminus of GFP to test if the hDHFR mutants can destabilize proteins of interest when fused to the C-terminus of the protein of interest. A linker, GGSGGG (SEQ ID NO. 6413) was placed between GFP and hDHFR and cloned into pLVX.IRES. Puro.

[1205] HEK 293T cells stably expressing GFP-hDHFR-WT or GFP-hDHFR(mutant) constructs were incubated with 1 μM MTX or 50 μM TMP or DMSO (control) for 48 hours. Following the incubation, median fluorescence intensity (MFI) was measured using FACS. All hDHFR(mutant)-GFP constructs demonstrated lower MFI intensities compared to hDHFR WT, suggesting a significant destabilization in the absence of the ligand (FIG. 20A). Mutants OT-hDHFRC-012 (hDHFR (Y122I), OT-hDHFRC-015 (hDHFR (A125F, Y122I), OT-hDHFRC-019 (hDHFR (Q36K, Y122I), and OT-hDHFRC-020, and (hDHFR (Q36F, N65F, Y122I) showed a several fold increase in MFI over DMSO with both MTX and TMP treatment suggesting that these constructs can be stabilized by both ligands. While OT-hDHFRC-018 (hDHFR (G21T, Y122I), OT-hDHFRC-022 (hDHFR V121A, Y122I) showed a fold increase in MFI over DMSO only with MTX suggesting a MTX dependent stabilization (FIG. 20B). These data show that human DHFR derived destabilizing domains can destabilize GFP when fused to C terminus.

### Example 5. Mutant hDHFR Ligand-Binding Characteristics

[1206] The binding of hDHFR mutants to varying doses of ligands was characterized using DHFR mutants fused to N terminus of AcGFP. HEK293 cells stably expressing OT-hDHFRN-002 (hDHFR(Y122I)-GFP) construct were incubated with varying concentrations of MTX or DMSO in DMEM with 10% FBS for 48 hrs. Median GFP fluorescence intensity was measured using FACS analysis. hDHFR (Y122I) mutant showed a ligand dose dependent increase in GFP intensity (FIG. 21A). This data suggests that hDHFR (Y122I) was stabilized by MTX in a dose dependent manner. Since MTX is also an inhibitor of DHFR, the IC50 was also calculated and an IC₅₀ of 108 nM was obtained.

[1207] HEK293 cells stably expressing OT-hDHFRN-002 (hDHFR(Y122I)-GFP), OT-hDHFRN-005 (hDHFR (A125F, Y122I)), OT-hDHFRN-008 (hDHFR (G21T, Y122I)) and OT-hDHFRN-021 (hDHFR (V121A, Y122I)) constructs were incubated with varying concentrations of TMP or DMSO in DMEM with 10% FBS for 48 hrs. Mean GFP fluorescence intensity was measured using FACS analysis (FIG. 21B). All mutants showed ligand dose dependent increase in GFP intensity suggesting an increase in TMP dependent stabilization of the hDHFR mutants.

[1208] Since TMP is also an inhibitor of DHFR, the IC₅₀ was also calculated for each of the mutants and is shown in Table 51.

TABLE 51
hDHFR ligand binding affinity

| | | IC₅₀ |
|---|---|---|
| Construct ID. | Construct | (μM) |
| OT-hDHFRN-002 | pLVX-hDHFR(Y122I). | 3.841 |
| | AcGFP-IRES-Puro | |
| OT-hDHFRN-005 | pLVX-hDHFR (A125F, Y122I). | 18.89 |
| | AcGFP-IRES-Puro | |
| OT-hDHFRN-008 | pLVX-hDHFR (G21T, Y122I). | 57.1 |
| | AcGFP-IRES-Puro | |
| OT-hDHFRN-021 | pLVX-hDHFR (V121A, Y122I). | 28.7 |
| | AcGFP-IRES-Puro | |

[1209] As shown in Table 51, all mutants showed an IC50 at the micromolar concentrations of TMP.

[1210] The kinetics of destabilization of the human DHFR mutants following ligand dependent stabilization was assessed after ligand withdrawal. The wildtype human DHFR construct (OT-hDHFRN-001) and the four DHFR mutants tested i.e. OT-hDHFRN-002(hDHFR(Y122I)), OT-hDHFRN-005 (hDHFR (A125F, Y122I)), OT-hDHFRN-021 (hDHFR (V121A, Y122I)) and OT-hDHFRN-008 (hDHFR (G21T, Y122I)) were tested in this context. HEK293 cells stably expressing hDHFR—WT or hDHFR mutant constructs were incubated with 50 μM TMP in DMEM with 10% FBS for 48 hours. Following incubation, cells were washed with DMEM containing 10% FBS. DMEM containing 1 μg/mL recombinant human DHFR protein was added to the cells and were further incubated for 2, 4, 6 or 24 hours. Median fluorescence intensity of the cells was measured using FACS and compared to the median fluorescence intensity of cells before incubation with the recombinant human DHFR (time 0). The results are depicted as the percentage of median fluorescence intensity (MFI) of GFP remaining after time 0 (FIG. 22). All mutants showed a decrease in % MFI over time with virtually no signal detected at 24 hours. As expected, the wildtype human DHFR construct did not show a decrease in fluorescence intensity over time. These data show that each mutant has a unique profile with respect to the time course of destabilization and GFP can be almost completely destabilized by mutants following ligand withdrawal.

### Example 6. In Vivo TMP Pharmacokinetics

[1211] To test TMP pharmacokinetics in vivo, Balb/C nu/nu mice were dosed with one of three different concentrations of TMP 30 mg/kg, 100 mg/kg, or 300 mg/kg TMP. The concentration of TMP in the plasma was measured at 0.083 hours, 0.25 hours, 0.5 hours, 1 hour, 2 hours, 4 hours, 8 hours, 12 hours, 16 hours, 20 hours, and 24 hours after dosing. The plasma TMP levels at different time points are presented in Table 52.

TABLE 52
Plasma TMP levels

| Time | 300 mg/kg | 100 mg/kg | 30 mg/kg |
|---|---|---|---|
| (hrs) | TMP | TMP | TMP |
| 0.083 | 116.77 | 81.55 | 25.67 |
| 0.25 | 136.92 | 78.10 | 19.55 |
| 0.5 | 128.05 | 58.79 | 9.84 |
| 1 | 80.00 | 27.59 | 2.55 |
| 2 | 32.63 | 2.97 | 1.19 |
| 4 | 1.03 | 0.99 | 0.16 |
| 8 | 0.30 | 0.56 | 0.04 |
| 24 | 0.01 | 0.01 | not measured |

[1212] 100 mg/kg resulted in TMP concentrations in the plasma of 50-100 μM at the early time points and 300 mg/kg dose resulted in 100-150 μM plasma concertation of TMP at early time points. Virtually no TMP levels were detected in the plasma 4 hours after dosing. Thus 100 mg/kg represents the lowest dose that results in significant plasma concentrations of TMP that may be required for human DHFR stabilization in vivo.

### Example 7. Human DHFR Regulated Expression of IL15-IL15Ra Fusion Molecule

[1213] A fusion molecule was generated by fusing membrane bound IL15, IL15 Receptor alpha subunit (IL15Ra) and human DHFR (DD). These fusion molecules were cloned into pLVX-EF 1a-IRES-Puro vector.

[1214] Membrane bound-IL15-IL15Ra constructs (OT-IL15-008 to OT IL-15-011) were transduced into human colorectal carcinoma cell line, HCT-116 and stable integrants were selected with 2 μg of puromycin. Stably integrated cells were incubated for 24 hours in the presence or absence of 10 μM Trimethoprim or 1 μM Methotrexate.

[1215] Surface expression of IL15-IL15Ra fusion constructs was examined by staining with PE-conjugated IL15Ra antibody (Cat no. 330207, Biolegend, San Diego, CA). The median fluorescence intensity obtained with the different constructs in the presence or absence of the corresponding ligand is presented in Table 53. The stabilization ratio was calculated as the fold change in fluorescence intensity in ligand treated samples compared to treatment with DMSO (i.e. in the absence of ligand) with the same construct. The destabilization ratio was calculated as the fold change in fluorescence intensity in the DD regulated constructs compared to the constitutive construct (OT-IL15-008) in the absence of the ligand. Destabilization ratios less than 1 and stabilization ratios greater than 1 are desired in DDs.

TABLE 53
Surface expression of IL15-IL15Ra fusion constructs

| | Median Fluorescence Intensity | | | Destabilization | Stabilization ratio | |
|---|---|---|---|---|---|---|
| Construct | DMSO | 10 μM TMP | 1 μM MTX | ratio | TMP | MTX |
| HCT-116 cells | 273 | — | — | — | — | — |
| (control) | | | | | | |
| OT-IL15-008 | 5315 | 7019 | — | 19.47 | 1.32 | |
| (Constitutive) | | | | | | |
| OT-IL15-010 (hDHFR | 2657 | 5775 | 15864 | 3.48 | 2.17 | 5.97 |
| (Y122I, A125F)) | | | | | | |
| OT-IL15-011 (hDHFR | 1560 | 4010 | 14509 | 0.59 | 2.57 | 9.30 |
| (Q36F, N65F, Y122I)) | | | | | | |

[1216] Cells transduced with IL-15-IL15Ra fused to human DHFR constructs showed lower fluorescence intensity than the constitutive construct with DMSO treatment. Addition of TMP resulted in an increase in fluorescence with all constructs. Destabilization ratios less than one was observed with OT-IL15-011(hDHFR (Q36F, N65F, Y122I)) indicating a strong destabilization in the absence of ligand. Stabilization ratio greater than 1 was observed with all constructs with TMP treatment and with both OT-IL15-010 and 11 with MTX treatment. These data show that OT-IL15-011 is both strongly destabilized in the absence of ligand and strongly stabilized in the presence of ligand.

[1217] To further confirm expression and ligand-dependent stabilization of IL15-IL15Ra constructs (OT-IL15-008, OT-IL15-010, OT-IL15-011) in HCT-116, cells were incubated with 10 μM Trimethoprim or 1 μM Methotrexate or DMSO for 24 hours. Following incubation, cells were harvested and cell extracts were prepared. Cell extracts were run on SDS-PAGE and western blotted with anti-IL15 antibody (Catalog No. 7213, Abcam, Cambridge, UK). As shown in FIG. 23, the IL15/IL15Ra constitutive construct (OT-IL15-008) showed ligand independent IL15 expression while the DD regulated constructs (OT-IL15-0010 and OT-IL115-011) showed ligand dependent IL15 expression. The identity of the IL15 bands was also confirmed by immunoblotting with the anti-human DHFR antibody (Catalog No. 117705, Genetex, Irvine, CA). Both IL15-IL15Ra fusion constructs (OT-IL15-010 and 011) showed ligand dependent expression of DHFR expression.

### Example 8. Ligand Dependent Expression of DD IL15-IL15Ra Fusion Molecule

[1218] To evaluate the dependence of ligand induced stabilization on the dose of the ligand, IL15-IL15Ra fusion constructs namely, OT-IL15-008, OT-IL15-010 (hDHFR (Y122I, A125F)), and OT-IL15-011 (hDHFR (Q36F, N65F, Y122I)) were stably transduced into HCT-116 cells and incubated with increasing concentrations of Trimethoprim for 24 hours. Surface expression of IL15-IL15Ra fusion constructs was quantified by FACS using IL15Ra− PE antibody. The median fluorescence intensity with increasing doses of TMP is represented in Table 54.

TABLE 54
Surface expression of IL15-IL15Ra fusion constructs

| | Median Fluorescence Intensity | |
|---|---|---|
| Dose | hDHFR | hDHFR |
| (μM) | (Y122I, A125F) | (Q36F, N65F, Y122I) |
| DMSO | 3034 | 2357 |
| 0.01 | 2791 | 2291 |
| 0.02 | 2833 | 2216 |
| 0.05 | 2924 | 2054 |
| 0.14 | 2740 | 2150 |
| 0.41 | 2817 | 2400 |
| 1.23 | 2890 | 2251 |
| 3.7 | 3117 | 2494 |
| 11.11 | 3473 | 2841 |
| 33.33 | 4019 | 3409 |
| 100 | 5227 | 4592 |

[1219] As shown in Table 54, all three constructs showed a dose dependent increase in median fluorescence intensity indicating a dose dependent increase in surface expression of IL15-IL15Ra fusion upon addition of DD stabilizing ligand.

### Example 9. DD Regulated Expression of IL15-IL15Ra Fusion Molecule

[1220] A fusion molecule is generated by fusing membrane bound IL15, IL15 Receptor alpha subunit (IL15Ra) and DDs such as ecDHFR (DD), FKBP (DD), or human DHFR (DD). These fusion molecules were cloned into pLVX-EF1a-IRES-Puro vector.

[1221] To test ligand dependent IL15-IL15Ra production, 1 million HEK-293T cells were plated in a 6-well plate in growth media containing DMEM and 10 FBS and incubated overnight at 37° C., 5% CO2. Cells were then transfected with 100 ng of constitutive IL15-IL15Ra (OT-IL15-008) or DD linked IL15-IL15Ra (OT-IL15-006, OT-IL15-007, OT-IL15-009, OT-IL15-010, OT-IL15-011) using Lipofectamine 2000 and incubated for 24 hrs. Following the incubation, media is exchanged for growth medium with or without 10 μM Trimethoprim or 1 μM Shield-1 and further incubated for 24 hrs. Cells were harvested and IL15 levels are analyzed via western blotting using human IL15 antibody (Abcam, Cambridge, UK). OT-IL15-009 showed the strong ligand (Trimethoprim) dependent stabilization of IL15, while OT-IL15-006 and OT-IL15-007 showed modest ligand dependent stabilization of IL15 (FIG. 24A).

[1222] Surface expression of membrane bound IL15-IL15Ra constructs (OT-IL15-006, OT-IL15-007, OT-IL15-008, OT-IL15-009, OT-IL15-010, OT-IL15-011) was determined by FACS using anti-IL15 and anti-IL15Ra antibodies. HEK293T cells were transfected with IL15-IL15Ra constructs and then treated with suitable ligand (Shield-1 or Trimethoprim). 48 hours after transfection, cells were analyzed using FACS. As expected, constitutive IL15-IL15Ra construct OT-IL15-008 showed high surface expression of IL15 and IL15Ra both in the presence and absence of ligand. Consistent with the results from the western blot, OT-IL15-009 showed the strong ligand (Trimethoprim) dependent surface expression of IL15 and IL15Ra (FIG. 24B, FIG. 24C).

[1223] Membrane bound-IL15-IL15Ra constructs (OT-IL15-008 to OT IL15-011) were transduced into human colorectal carcinoma cell line, HCT-116 and stable integrants were selected with 2 μg of puromycin. Stably integrated cells were then incubated for 24 hours in the presence or absence of 10 μM Trimethoprim or 1 μM Methotrexate.

[1224] Surface expression of IL15-IL15Ra fusion constructs was examined by staining with PE-conjugated IL15Ra antibody (Cat no. 330207, Biolegend, San Diego, CA). The median fluorescence intensity obtained with the different constructs in the presence or absence of the corresponding ligand is presented in Table 55.

TABLE 55
Surface expression of IL15-IL15Ra fusion constructs

| | Median Fluorescence Intensity | | |
|---|---|---|---|
| | | 10 μM | 1 μM |
| Construct | DMSO | TMP | MTX |
| HCT-116 cells (control) | 273 | | |
| OT-IL15-008 (Constitutive) | 5315 | 7019 | |
| OT-IL15-006 (ecDHFR (R12Y, E129K) | 764 | 2978 | |
| OT-IL15-010 (hDHFR (Y122I, A125F)) | 2657 | 5775 | 15864 |
| OT-IL15-011(hDHFR (Q36F, N65F, | 1560 | 4010 | 14509 |
| Y122I)) | | | |

[1225] The stabilization ratio was calculated as the fold change in GFP intensity in ligand treated samples compared to treatment with DMSO (i.e. in the absence of ligand) with the same construct. The destabilization ratio was calculated as the fold change in GFP intensity in the DD regulated constructs compared to the constitutive construct (OT-IL15-008) in the absence of the ligand. Destabilization ratios less than 1 and stabilization ratios greater than 1 are desired in DDs. The ratios are presented in Table 56.

TABLE 56
IL15-IL15Ra destabilization and stabilization ratios

| | Destabi- | | |
|---|---|---|---|
| | lization | Stabilization ratio | |
| Construct | ratio | TMP | MTX |
| OT-IL15-008 (Constitutive) | 19.47 | 1.32 | |
| OT-IL15-006 (ecDHFR (R12Y, E129K) | 0.14 | 3.90 | — |
| OT-IL15-010 (hDHFR (Y122I, A125F)) | 3.48 | 2.17 | 5.97 |
| OT-IL15-011(hDHFR (Q36F, N65F, | 0.59 | 2.57 | 9.30 |
| Y122I)) | | | |

[1226] Destabilization ratios less than one was observed with OT-IL15-006 (ecDHFR (R12H, E129K)) and OT-IL15-011(hDHFR (Q36F, N65F, Y122I)) indicating a strong destabilization in the absence of ligand. Stabilization ratio greater than 1 was observed with all constructs with TMP treatment and with both OT-IL15-010 and 11 with MTX treatment. These data show that OT-IL15-006 and OT-IL15-011 are both strongly destabilized in the absence of ligand and strongly stabilized in the presence of ligand.

[1227] The expression and ligand-dependent stabilization of IL15-IL15Ra constructs (OT-IL15-008 to OT-IL15-011) was measured in HCT-116. Cells were incubated with 10 μM Trimethoprim or 1 μM Methotrexate or DMSO for 24 hours. Following incubation, cells were harvested and cell extracts were prepared. Cell extracts were run on SDS-PAGE and western blotted with anti-IL15 antibody (Catalog No. 7213, Abcam, Cambridge, UK). As shown in FIG. 24D, the IL15/IL15Ra constitutive construct (OT-IL15-008) showed ligand independent IL15 expression while the DD regulated constructs (OT-IL15-009 to OT-IL15-011) showed ligand dependent IL15 expression. The identity of the IL15 bands was also confirmed by immunoblotting with the anti-human DHFR antibody (Catalog No. 117705, Genetex, Irvine, CA). As shown in FIG. 24D, both IL15-IL15Ra fusion constructs (OT-IL15-010 and 011) showed ligand dependent expression of DHFR expression.

[1228] To evaluate the dose dependence of ligand induced stabilization, IL15-IL15Ra fusion constructs namely, OT-IL15-009 (ecDHFR (R12Y, Y100I)), OT-IL15-010 (hDHFR (Y122I, A125F)), and OT-IL15-011 (hDHFR (Q36F, N65F, Y122I)) were stably transduced into HCT-116 cells and incubated with increasing concentrations of Trimethoprim for 24 hours. Surface expression of IL15-IL15Ra fusion construct was quantified by FACS using IL15Ra− PE antibody. The median fluorescence intensity with increasing doses of TMP is represented in Table 57.

TABLE 57
Surface expression of IL15-IL15Ra

| | Median Fluorescence Intensity | | |
|---|---|---|---|
| Dose | ecDHFR | hDHFR | hDHFR |
| (μM) | (R12Y, Y100I) | (Y122I, A125F) | (Q36F, N65F, Y122I) |
| DMSO | 1260 | 3034 | 2357 |
| 0.01 | 1384 | 2791 | 2291 |
| 0.02 | 1492 | 2833 | 2216 |
| 0.05 | 1947 | 2924 | 2054 |
| 0.14 | 2741 | 2740 | 2150 |
| 0.41 | 3360 | 2817 | 2400 |
| 1.23 | 4014 | 2890 | 2251 |
| 3.7 | 4265 | 3117 | 2494 |
| 11.11 | 4267 | 3473 | 2841 |
| 33.33 | 4485 | 4019 | 3409 |
| 100 | 4633 | 5227 | 4592 |

[1229] As shown in Table 57, all three constructs showed a dose dependent increase in median fluorescence intensity indicating a dose dependent increase in surface expression of IL15-IL15Ra fusion upon addition of DD stabilizing ligand.

[1230] The time course of ligand dependent stabilization of IL15-IL15Ra fusion constructs was measured in HCT-116 cells. Cells were transduced with OT-IL15-009 (ecDHFR (R12Y, Y100I) construct and incubated with 10 μM Trimethoprim for 0, 12, 16, 24, 48 or 72 hours. Following incubations, surface expression of IL15-IL15Ra fusion construct was quantified by FACS using IL15Ra− PE antibody and compared to parental untransfected cells. The median fluorescence intensity (MFI) over time is represented in Table 58.

TABLE 58
Time course of IL15-IL15Ra surface expression

| Time | |
|---|---|
| (hours) | MFI |
| Parental | 3054 |
| 0 | 4004 |
| 12 | 7054 |
| 16 | 9390 |
| 24 | 14056 |
| 48 | 28644 |
| 72 | 35303 |

[1231] As shown in Table 58, OT-IL15-009 (ecDHFR (R12Y, Y100I) showed a time-dependent increase in median fluorescence intensity indicating that the surface expression of IL15-IL15Ra fusion increased with increased duration of treatment with DD stabilizing ligand.

### Example 10. Predicting Novel DDs Based on DHFR Mutagenesis Data

[1232] Human DHFR mutants generated by site directed and random mutagenesis were compared with wildtype human DHFR protein sequence and analyzed for patterns. Exemplary alignments are shown in FIG. 25A, and FIG. 25B. The analysis of the sequences showed that many hDHFR DDs mutations match a vicinal amino acid, located up to 5 amino acids upstream or downstream of the mutation site. The human DHFR mutants that have been mutated to the immediately upstream or downstream wildtype amino acid are listed in Table 59.

TABLE 59
DHFR mutant analysis

| | Vicinal |
|---|---|
| hDHFR | amino acid |
| mutant | and location |
| I8V | 9V |
| V9A | A10 |
| A10V | V9 |
| Q36F | F35 |
| F59S | S60 |
| L74N | N73 |
| F89L | L90 |
| S93R | R92 |
| T137R | R138 |
| R138I | I139 |
| M140I | I139 |
| K185E | E184 |
| N186D | D187 |

[1233] The human DHFR mutants that have been mutated to the wildtype amino acid that is two to five amino acids upstream or downstream of the position of the mutation are listed in Table 60.

TABLE 60
DHFR mutant analysis

| | Vicinal wildtype |
|---|---|
| hDHFR | amino acid |
| mutant | and location |
| I72V | V75 |
| L94A | L98 |
| A107V | V110 |
| V110A | A107 |
| V121A | A125 |
| N127Y | Y122 |
| V136M | M140 |
| M140V | V136 |
| P150L | L154 |
| I176F | F180 |
| Y183H | Y178 |

### Example 11. Characterization of hDHFR Mutants Using Thermal Shift Assays

[1234] Thermal shift assays can be used to measure the thermal denaturation temperature of a protein as an indicator of its stability in response to different conditions such as pH, ions, salts, additives, drugs, and/or mutations. It can also be used to determine conditions under which protein stabilization or destabilization can be maximized. Human DHFR mutants are mixed with a thermal assay dye, thermal assay buffer, and ligand (or DMSO control). Samples are also treated with varying concentrations of factors such as drugs, salts, ions, or other parameters. The samples are loaded into an instrument such as a real-time PCR instrument and the temperature ramp rates is set within a range of approximately 0.1-10 degrees Celsius per minute. The fluorescence in each condition is measured at regular intervals, over a temperature range spanning the typical protein unfolding temperatures of 25-95 degrees Celsius.

### Example 12. DD Regulated Recombinant IL12 Expression

[1235] DHFR (DD)-IL12 constructs are packaged into pLVX-IRES-Puro lentiviral vectors with CMV, EF1a, PGK or without a promoter. hDHFR (Q36F, Y122I, A125F (OT-IL12-008) or the constitutive construct (OT-IL12-006) and cloned into a pLVX-CMV-IRES-Puro. A p40 signal sequence was inserted at the N terminus of the construct and a furin protease cleavage site or a modified furin site was also included (see Table 38).

[1236] HEK293T cells are transiently or stably transfected, or stably transduced with IL12 constructs (OT-IL12-006, and OT-IL12-008), and subsequently treated with Trimethoprim, or Methotrexate, or left untreated for 6 hours. Culture media is collected from transfected cells and diluted 1:50 to measure IL12 levels using p40 ELISA. Treatment with ligand is expected to result in a significant increase in IL12 over untreated control.

[1237] To evaluate ligand (MTX or TMP) dependent 1L12 induction over time, 2 million cells e.g. HEK 293T cells are plated in growth medium and incubated overnight in the presence of TMP or MTX, or left untreated. Cells are then incubated for additional time ranging from 2 to 72 hours and growth media is collected from the cells at all time points. Growth media is diluted 400-fold and IL12 levels are measured using IL12 p40 ELISA. IL12 expression in ligand treated cells is expected to increase over time.

### Example 13. DD Regulated CD19 CAR

[1238] A CD19 CAR fusion polypeptide was linked to the N terminus of human DHFR derived DDs (as shown in Table 11) and the constructs are cloned into pLVX-IRES-Puro vector.

[1239] To test ligand dependent expression of DD-CD19 CAR constructs, 1 million HEK 293T cells are cultured in growth medium containing DMEM and 10% FBS and transfected with CAR constructs using Lipofectamine 2000. 48 hours after transfection, cells are treated 10 μM Trimethoprim or vehicle control and incubated further for another 24 hours. Cells are then harvested, lysed and immunoblotted for CD3 Zeta using anti-CD247 (BD Pharmingen, Franklin Lanes, NJ) and Alexa 555-conjugated-goat-anti mouse antibody (red) (Li-Cor, Lincoln, NE). Lysates are also immunoblotted for Actin with Alexa 488-conjugated secondary antibody (green) to confirm even protein loading across all samples. Compared to the untreated control, TMP treated human DHFR mutant CD19 CAR constructs (OT-CD19C-008 to OT-CD19C-011) are expected to show an increase in CD3 Zeta protein levels in the presence of TMP indicating the stabilization of the CD19 CAR.

[1240] Surface expression of CD19 CAR-hDHFR constructs in HEK 293T cells is measured using FACS with Protein L-Biotin-Streptavidin-Allophycocyanin which binds to the kappa light chain of the CAR (ThermoFisher Scientific, Waltham, MA). Cells are treated with 10 μM Trimethoprim or 1 μM MTX, or vehicle control for 24 hours and subject to FACS analysis. Surface expression of CD19 CAR-hDHFR constructs is expected to be detected only in the presence of ligand.

### Example 14. Trimethoprim Versus Methotrexate Binding Determinants

[1241] The affinity of DHFR mutants identified by random mutagenesis for ligands TMP and MTX was tested. HEK293T cells expressing mutants were treated with varying concentrations of TMP or MTX and GFP intensity was measured using FACS. The ligand binding potential of the mutants was also compared to the wildtype DHFR in the same experiment. The results are presented in Table 61 for Methotrexate and in Table 62 for Trimethoprim. The percentage normalized response was obtained by subtracting the background fluorescence intensity from the fluorescence intensity obtained with each sample. The values were then normalized to the fluorescence intensity obtained with the 100 μM of ligand. In Table 61 and Table 62, the percentage normalized values obtained for the mutants was greater than the wildtype protein at that concentration of ligand.

TABLE 61
Methotrexate binding analysis

| | % Normalized Response | | | | | |
|---|---|---|---|---|---|---|
| | | Clone C1-3 | Clone C1-4 | Clone C1-8 | Clone C1-14 | Clone C1-25 |
| MTX | hDHFR | (hDHFR | (hDHFR | (hDHFR | (hDHFR | (hDHFR |
| (μM) | (WT) | (A107V)) | (F59S)) | (I17V)) | (N127Y)) | (K185E)) |
| 100 | 100 | 100 | 100 | 100 | 100 | 100 |
| 33.333 | 90.82 | 139.6 | 161.79 | 60.9 | 54.12 | 87.71 |
| 11.111 | 79.16 | 98.85 | 113.46 | 51.03 | 40.32 | 55.64 |
| 3.704 | 60.09 | 69.01 | 54.34 | 37.52 | 35.37 | 7.27 |
| 1.235 | 31.13 | 33.21 | 21.1 | 10.65 | 1.65 | 1.41 |
| 0.412 | −9.04 | 5.21 | 2.52 | 0.32 | −0.21 | 0.15 |
| 0.137 | −9.02 | −3.52 | −0.12 | −0.09 | −0.51 | −0.05 |
| 0.046 | −6.07 | −5.56 | −0.18 | 0.1 | −0.56 | −0.06 |

[1242] As shown in Table 61, Clone C1-3 (hDHFR (A107V)) mutant showed higher fluoresce intensity values than hDHFR (WT) at multiple doses of MTX. Clone C1-4 (hDHFR (F59S)) showed an increase in fluorescence intensity at 33.3 and 11 μM doses of MTX. Clone C1-8 (hDHFR (I17V)), hDHFR (N127Y), and hDHFR (K185E) mutants showed fluorescence intensities that were less than hDHFR (WT).

TABLE 62
Trimethoprim binding analysis

| | % Normalized Response | | | | | |
|---|---|---|---|---|---|---|
| | | Clone C1-3 | Clone C1-4 | Clone C1-8 | Clone C1-14 | Clone C1-25 |
| TMP | hDHFR | (hDHFR | (hDHFR | (hDHFR | (hDHFR | (hDHFR |
| (μM) | (WT) | (A107V)) | (F59S)) | (I17V)) | (N127Y)) | (K185E)) |
| 100 | 100 | 100 | 100 | 100 | 100 | 100 |
| 33.333 | 74.33 | 80.33 | 36.05 | 57.35 | 62.48 | 38.84 |
| 11.111 | 49.7 | 50.43 | 8.01 | 26.08 | 22.34 | 7.58 |
| 3.704 | 5.37 | 27.08 | 1.64 | 7.49 | 5.41 | 0.57 |
| 1.235 | −0.22 | 10.6 | −0.29 | 0.44 | 0.7 | −0.27 |
| 0.412 | −6.73 | 4.22 | −0.57 | −0.27 | −0.09 | −0.43 |
| 0.137 | −10.58 | 2.51 | −0.56 | −0.51 | −0.23 | −0.47 |
| 0.046 | −8.3 | 1.56 | −0.57 | −0.28 | −0.2 | −0.44 |

[1243] As shown in Table 62, Clone C1-3 (hDHFR (A107V)) mutant showed higher fluorescence intensity values than hDHFR (WT) at multiple doses of TMP. Clone C1-8(hDHFR (I17V)) an increase in fluorescence intensity at 3.704 μM dose of TMP. Clone C1-8 (hDHFR ((17V)), Clone C1-14 (hDHFR (N127Y)), and Clone C1-25 (hDHFR (K185E)) mutants showed fluorescence intensities that were less than hDHFR (WT).

[1244] The binding of hDHFR mutants with MTX was compared to TMP by calculating TMP and MTX ratio. TMP ratio or MTX ratio was defined as the ratio of % Normalized Response of a mutant at a particular dose of the ligand (TMP or MTX) to the % Normalized Response of hDHFR (WT) at the same dose of the same ligand. The ratios are presented in Table 63.

TABLE 63
Methotrexate Vs. Trimethoprim binding analysis

| | | | Clone C1-4 | | Clone C1-8 | | Clone C1-14 | | Clone C1-21 | |
|---|---|---|---|---|---|---|---|---|---|---|
| | hDHFR | | (hDHFR | | (hDHFR | | (hDHFR | | (hDHFR | |
| | (A107V) | | (F59S)) | | (I17V)) | | (N127Y)) | | (K185E)) | |
| Ligand | MTX | TMP | MTX | TMP | MTX | TMP | MTX | TMP | MTX | TMP |
| (μM) | ratio | ratio | ratio | ratio | ratio | ratio | ratio | ratio | ratio | ratio |
| 100 | 1.00 | 1.00 | 1.00 | 1.00 | 1.00 | 1.00 | 1.00 | 1.00 | 1.00 | 1.00 |
| 33.333 | 1.54 | 1.08 | 1.78 | 0.48 | 0.67 | 0.77 | 0.60 | 0.84 | 0.97 | 0.52 |
| 11.111 | 1.25 | 1.01 | 1.43 | 0.16 | 0.64 | 0.52 | 0.51 | 0.45 | 0.70 | 0.15 |
| 3.704 | 1.15 | 5.04 | 0.90 | 0.31 | 0.62 | 1.39 | 0.59 | 1.01 | 0.12 | 0.11 |
| 1.235 | 1.07 | 10.38 | 0.68 | 1.32 | 0.34 | 2.00 | 0.05 | 3.18 | 0.05 | 1.23 |
| 0.412 | 0.58 | 0.63 | 0.28 | 0.08 | 0.04 | 0.04 | 0.02 | 0.01 | 0.02 | 0.06 |
| 0.137 | 0.39 | 0.24 | 0.01 | 0.05 | 0.01 | 0.05 | 0.06 | 0.02 | 0.01 | 0.04 |
| 0.046 | 0.92 | 0.19 | 0.03 | 0.07 | 0.02 | 0.03 | 0.09 | 0.02 | 0.01 | 0.05 |

[1245] As shown in Table 63, the MTX and TMP ratios obtained at multiple doses of ligand was comparable and greater than 1, suggesting that Clone C1-3 (hDHFR (A107V)) mutant can bind and be stabilized by both ligands at levels comparable to hDHFR (WT). Clone C1-4 (hDHFR (F59S)) and Clone C1-21 (hDHFR (K185E)) mutants can bind to and be stabilized by MTX at levels comparable to hDHFR (WT), but cannot be stabilized by TMP. While Clone C1-8 (hDHFR (I17V)) and Clone C1-14 (hDHFR (N127Y)) mutants can bind to and be stabilized by TMP, but cannot be stabilized by MTX. These data suggest that Clone C1-3 (hDHFR (A107V)) preserves TMP and MTX stabilization, Clone C1-4 (hDHFR (F59S)) selectively disrupts TMP stabilization while Clone C1-14 (hDHFR (N127Y)) and Clone C1-8 (hDHFR (I17V)) affect MTX stabilization. Thus, Clone C1-3(hDHFR (A107V)) maybe a better substrate for combination mutants and in the search for better TMP binders.

### Example 15. E. coli DHFR Regulated Expression

[1246] E. coli DHFR (amino acid 2-187 of WT) (R12Y, Y100I) (SEQ ID NO. 3103) were fused to GFP (SEQ ID NO. 6414) and cloned into pLVX vectors and transfected into 293T cells. Transfected cells were incubated with varying concentrations of TMP ranging from 0.001 to 10 μM TMP. DMSO was used as control. Fluorescence signal was measured by FACS and median fluorescence signal intensity (MFI) was calculated. The results are shown in Table 64. Relative MFI was calculated relative to untreated control.

TABLE 64
TMP dependent ecDHFR mutant expression

| | Median | |
|---|---|---|
| | Fluorescence | |
| TMP | Intensity | Relative |
| (μM) | (MFI) | MFI |
| 10 | 1241.61 | 72 |
| 1 | 1218.02 | 71 |
| 0.1 | 695.66 | 40 |
| 0.01 | 47.33 | 3 |
| 0.001 | 20.51 | 1 |
| 0 | 17.21 | 1 |

[1247] As shown in Table 64, the relative MFI of TMP treated cells increased with an increase in the concentration of TMP. The relative MFI values plateaued around 1p M TMP.

### Example 16. TMP Dose Responsive Expression of IL15-IL15Ra

[1248] IL15-IL15Ra fusion constructs, OT-IL15-008, and OT-IL15-010 were stably expressed in HCT116 cells are treated with increasing doses of TMP ranging from 10 μM, 33M, and 100 μM TMP for 24 hours. Cell lysates were obtained and immunoblotted with anti IL15Ra antibody. As shown in FIG. 26, an increase in IL15Ra expression was observed with OT-IL15-010 construct with the addition of TMP. As expected, the constitutive construct, OT-IL15-008 showed strong expression of IL15Ra both in the presence and absence of ligand.

### Example 17. TMP Dose Responsive Expression of IL15-IL15Ra

[1249] IL15-IL15Ra fusion constructs, OT-IL15-008, OT-IL15-009, and OT-IL15-010 were stably expressed in HCT116 cells and treated with increasing doses of TMP ranging from 10 μM, 33 μM, and 100 μM TMP for 24 hours. Cell lysates were immunoblotted with anti IL15Ra antibody. As shown in FIG. 27 and FIG. 54A, IL15Ra expression of OT-IL15-009 was virtually undetectable in the absence of TMP, and addition of increasing doses of TMP resulted in an increase in IL15Ra levels. Modest increase in IL15Ra expression was observed with OT-IL15-010 construct with the addition of TMP. As expected, the constitutive construct, OT-IL15-008 showed strong expression of IL15Ra both in the presence and absence of ligand.

### Example 18. DD Regulated CD19 CAR Expression

[1250] A CD19 CAR fusion polypeptide was linked to human DHFR-DD and the constructs were cloned into pLVX-IRES-Puro vector.

[1251] hDHFR DDs were positioned at the C terminus of the construct (OT-CD19C-008, OT-CD19C-009, OT-CD19C-010, OT-CD19C-011). In some instances, a furin cleavage site was added between the DD and the CD19 scFv. A constitutively expressed CAR construct, OT-CD19C-001 was used as a positive control.

[1252] To test ligand dependent expression of DD-CD19 CAR constructs, 1 million HEK 293T cells were cultured in growth medium containing DMEM and 10 FBS and transfected with CAR constructs using Lipofectamine 2000. 48 hours after transfection, cells were treated with 1 μM or 10 μM Shield-1, 10 μM Trimethoprim, 1 μM Methotrexate, or vehicle control and incubated for 24 hours. Cells were harvested, lysed and immunoblotted for CD3 Zeta, a component of the CAR, using anti-CD247 (BD Pharmingen, Franklin Lanes, NJ) and Alexa 555-conjugated-goat-anti mouse antibody (red) (Li-Cor, Lincoln, NE). Lysates were also immunoblotted for Actin with Alexa 488-conjugated secondary antibody (green) to confirm uniform protein loading in all the samples. As shown in FIG. 28A, OT-CD19C-008 and OT-CD19C-010 constructs showed strong increase in CD3 Zeta levels in the presence of Methotrexate and low levels in the absence of ligand, indicating a strong ligand-dependent stabilization of CD19 CAR. CD19C-009 showed modest increase in CD3 Zeta levels in the presence of Methotrexate, indicating a modest ligand-dependent stabilization of CD19 CAR.

[1253] Lysates from cells expressing CD19 CAR constructs were also immunoblotted for 4 1-BB, a component of the CAR. As shown in FIG. 28B, OT-CD19C-008, OT-CD19C-009, OT-CD19C-010 and OT-CD19C-011 showed low levels of 4-1 BB in the absence of ligand and high levels of 4-1 BB in the presence of the ligand, Methotrexate, indicating a strong ligand dependent stabilization of CD19 CAR using these constructs. Constructs OT-CD19N-014 and OT-CD19N-015, which contain a furin cleavage site, showed an additional, smaller 4 1BB protein product upon treatment with MTX. This smaller 4-1BB protein band was only seen with the addition of the ligand and its molecular weight is consistent with the size of the CD19 CAR. These data indicate that the furin cleavage occurs only with ligand treatment.

[1254] Surface expression of DD-CD19 CAR constructs in HEK 293T cells was measured using Fluorescence activated cell sorting (FACS) with Protein L-Biotin-Streptavidin-Allophycocyanin which binds to the kappa light chain of the CAR (ThermoFisher Scientific, Waltham, MA). Cells were treated with 1 μM Methotrexate, 10 μM Trimethoprim or vehicle control for 24 hours and subject to FACS analysis. The percentage of GFP positive cells obtained with each construct in the presence or absence of ligand is presented in Table 65. In Table 65, N/A indicates not applicable.

TABLE 65
Percentage GFP positive cells

| | | Percentage GFP positive cells | |
|---|---|---|---|
| Construct | Ligand | No Ligand | Ligand |
| OT-CD19C-001 | N/A | 46.8 | 45.4 |
| OT-CD19C-008 | MTX | 15.8 | 31.3 |
| OT-CD19C-009 | MTX | 16.5 | 34.2 |
| OT-CD19C-010 | MTX | 14.8 | 33 |
| OT-CD19C-011 | MTX | 14.5 | 32.9 |
| OT-CD19C-014 | MTX | 4.68 | 16.2 |
| OT-CD19C-015 | MTX | 3.04 | 18.2 |

[1255] An increase in the percentage GFP positive cells was observed with OT-CD19C-008, OT-CD19C-009, OT-CD19C-010, OT-CD19C-011, OT-CD19C-014, and OT-CD19C-015. The highest increase in percentage GFP positive cells was observed with OT-CD19C-014, and OT-CD19C-015 constructs.

[1256] The mean fluorescence intensities are presented in Table 66. In Table 66, MFI represents mean fluorescence intensity. The stabilization ratio was calculated as the fold change in GFP intensity in ligand treated samples compared to treatment with DMSO (i.e. in the absence of ligand) with the same construct. The destabilization ratio was calculated as the fold change in GFP intensity in the DD regulated constructs compared to the constitutive construct (OT-CD19C-001) in the absence of the ligand. Destabilization ratios less than 1 and stabilization ratios greater than 1 are desired.

TABLE 66
CD19 CAR surface expression

| | | | | Destabi- | Stabi- |
|---|---|---|---|---|---|
| | | MFI | | lization | lization |
| Construct | Ligand | No Ligand | Ligand | Ratio | Ratio |
| OT-CD19C-001 | N/A | 453 | 407 | | 0.90 |
| OT-CD19C-008 | MTX | 89.4 | 148 | 0.20 | 1.66 |
| OT-CD19C-009 | MTX | 93.3 | 200 | 0.21 | 2.14 |
| OT-CD19C-010 | MTX | 85.6 | 160 | 0.19 | 1.87 |
| OT-CD19C-011 | MTX | 83.3 | 172 | 0.18 | 2.06 |
| OT-CD19C-014 | MTX | 78.6 | 124 | 0.17 | 1.58 |
| OT-CD19C-015 | MTX | 73.3 | 143 | 0.16 | 1.95 |

[1257] A destabilization ration less than 1 was observed with all constructs indicating that all DD regulated constructs are destabilized in the absence of ligand. A stabilization ratio of greater than 1 was observed with OT-CD19C-008, OT-CD19C-009, OT-CD19C-010, OT-CD19C-011, OT-CD19C-014 and OT-CD19C-015. Notably, these constructs were also destabilized in the absence of ligand and therefore represent suitable CD19-DD constructs.

### Example 19. DD Regulated CD19 CAR Expression

[1258] A CD19 CAR fusion polypeptide was linked to either FKBP-DD, ecDHFR-DD or human DHFR-DD and the constructs were cloned into pLVX-IRES-Puro vector.

[1259] FKBP, ecDHFR and hDHFR DDs were positioned either between the CD19 scFv and the CD8αhinge (OT-CD19C-002, OT-CD19C-003), between the CD8αhinge and the transmembrane domain (OT-CD19C-004, OT-CD19C-005) or at the C terminus of the construct (OT-CD19C-007, OT-CD19C-008, OT-CD19C-009, OT-CD19C-010, OT-CD19C-011). In some instances, a furin cleavage site was added between the DD and the CD19 scFv. A constitutively expressed CAR construct, OT-CD19C-001 was used as a positive control.

[1260] To test ligand dependent expression of DD-CD19 CAR constructs, 1 million BEK 293T cells were cultured in growth medium containing DMEM and 10% FBS and transfected with CAR constructs using Lipofectamine 2000. 48 hours after transfection, cells were treated with 1 μM or 10 μM Shield-1, 10 μM Trimethoprim, 1 μM Methotrexate, or vehicle control and incubated for 24 hours. Cells were harvested, lysed and immunoblotted for CD3 Zeta, a component of the CAR, using anti-CD247 (BD Pharmingen, Franklin Lanes, NJ) and Alexa 555-conjugated-goat-anti mouse antibody (red) (Li-Cor, Lincoln, NE). Lysates were also immunoblotted for Actin with Alexa 488-conjugated secondary antibody (green) to confirm uniform protein loading in all the samples. Compared to the untreated control, OT-CD19C-002 and OT-CD19C-003 showed increased levels of CD3 Zeta in the presence of ligands Shield-1 and TMP respectively indicating the stabilization of the CD19 CAR (FIG. 29A). As shown in FIG. 29B, OT-CD19C-008 and OT-CD19C-010 constructs showed strong increase in CD3 Zeta levels in the presence of Methotrexate and low levels in the absence of ligand, indicating a strong ligand-dependent stabilization of CD19 CAR. OT-CD19C-007 and OT-CD19C-009 showed modest increase in CD3 Zeta levels in the presence of Shield-1 and Methotrexate respectively, indicating a modest ligand-dependent stabilization of CD19 CAR. As expected, the constructively expressed, OT-CD19C-001 showed strong expression of CD19 CAR in the absence of ligand treatment.

[1261] Lysates from cells expressing CD19 CAR constructs were also immunoblotted for 4 1-BB, a component of the CAR. As shown in FIG. 29C, OT-CD19C-008, OT-CD19C-009, OT-CD19C-010 and OT-CD19C-011 showed low levels of 4-1 BB in the absence of ligand and high levels of 4-1 BB in the presence of the ligand, Methotrexate, indicating a strong ligand dependent stabilization of CD19 CAR using these constructs. OT-CD19C-003, OT-CD19C-006 and OT-CD19C-007 showed modest increase in 4-1BB expression levels with treatment of corresponding ligands—TMP and Shield-1, indicating a modest ligand dependent stabilization of CD19 CAR. Constructs OT-CD19N-014 and OT-CD19N-015, which contain a furin cleavage site, showed an additional, smaller 4 1BB sized protein product upon treatment with MTX. This smaller sized 4-1BB protein band was only seen with the addition of the ligand and its molecular weight is consistent with the size of the CD19 CAR in OT-CD19-001. These data indicate that the furin cleavage occurs only with ligand treatment.

[1262] Surface expression of DD-CD19 CAR constructs in HEK 293T cells was measured using Fluorescence activated cell sorting (FACS) with Protein L-Biotin-Strepavidin-Allophycocyanin which binds to the kappa light chain of the CAR (ThermoFisher Scientific, Waltham, MA). Cells were treated with 1p M Shield-1, 1 μM Methotrexate, 1 μM Trimethoprim or vehicle control for 24 hours and subject to FACS analysis. As shown in FIG. 29D, surface expression of OT-CD19C-002 with FKBP-DD was detected only in the presence of Shield-1, while OT-CD19C-003 with ecDHFR-DD showed surface expression only in the presence of Trimethoprim. As expected, constitutively expressed construct OT-C19C-001 showed high expression both in ligand and control vehicle treated cells. Additional constructs were analyzed by FACS with Protein L-Biotin-Strepavidin-Allophycocyanin in a separate experiment. The percentage of GFP positive cells obtained with each construct in the presence or absence of ligand is presented in Table 67. In Table 67, N/A indicates not applicable.

TABLE 67
Percentage GFP positive cells

| | | Percentage GFP positive cells | |
|---|---|---|---|
| Construct | Ligand | No Ligand | Ligand |
| OT-CD19C-001 | N/A | 46.8 | 45.4 |
| OT-CD19C-006 | TMP | 46.6 | 43.6 |
| OT-CD19C-007 | Shield-1 | 28.9 | 34 |
| OT-CD19C-008 | MTX | 15.8 | 31.3 |
| OT-CD19C-009 | MTX | 16.5 | 34.2 |
| OT-CD19C-010 | MTX | 14.8 | 33 |
| OT-CD19C-011 | MTX | 14.5 | 32.9 |
| OT-CD19C-012 | TMP | 19.1 | 18.7 |
| OT-CD19C-013 | Shield-1 | 0.91 | 0.4 |
| OT-CD19C-014 | MTX | 4.68 | 16.2 |
| OT-CD19C-015 | MTX | 3.04 | 18.2 |

[1263] An increase in the percentage GFP positive cells was observed with OT-CD19C-007, OT-CD19C-008, OT-CD19C-009, OT-CD19C-010, OT-CD19C-011, OT-CD19C-014, and OT-CD19C-015. The highest increase in the percentage of GFP positive cells was observed with OT-CD19C-014, and OT-CD19C-015 constructs.

[1264] The mean fluorescence intensities are presented in Table 68. In Table 68, MFI represents mean fluorescence intensity. The stabilization ratio was calculated as the fold change in GFP intensity in ligand treated samples compared to treatment with DMSO (i.e. in the absence of ligand) with the same construct. The destabilization ratio was calculated as the fold change in GFP intensity in the DD regulated constructs compared to the constitutive construct (OT-CD19C-001) in the absence of the ligand. Destabilization ratios less than 1 and stabilization ratios greater than 1 are desired.

TABLE 68
CD19 CAR surface expression

| | | | | Destabi- | Stabi- |
|---|---|---|---|---|---|
| | | MFI | | lization | lization |
| Construct | Ligand | No Ligand | Ligand | Ratio | Ratio |
| OT-CD19C-001 | N/A | 453 | 407 | | 0.90 |
| OT-CD19C-006 | TMP | 425 | 325 | 0.94 | 0.76 |
| OT-CD19C-007 | Shield-1 | 132 | 123 | 0.29 | 0.93 |
| OT-CD19C-008 | MTX | 89.4 | 148 | 0.20 | 1.66 |
| OT-CD19C-009 | MTX | 93.3 | 200 | 0.21 | 2.14 |
| OT-CD19C-010 | MTX | 85.6 | 160 | 0.19 | 1.87 |
| OT-CD19C-011 | MTX | 83.3 | 172 | 0.18 | 2.06 |
| OT-CD19C-012 | TMP | 112 | 105 | 0.25 | 0.94 |
| OT-CD19C-013 | Shield-1 | 61 | 49.5 | 0.13 | 0.81 |
| OT-CD19C-014 | MTX | 78.6 | 124 | 0.17 | 1.58 |
| OT-CD19C-015 | MTX | 73.3 | 143 | 0.16 | 1.95 |

[1265] A destabilization ration less than 1 was observed with all constructs indicating that all DD regulated constructs are destabilized in the absence of ligand. A stabilization ratio of greater than 1 was observed with OT-CD19C-008, OT-CD19C-009, OT-CD19C-010, OT-CD19C-011, OT-CD19C-014 and OT-CD19C-015. Notably, these constructs were also destabilized in the absence of ligand and therefore represent suitable CD19-DD constructs.

### Example 20. Dose Dependent Stabilization of DDs Derived by Random Mutagenesis

[1266] The ligand dose responsive of human DHFR mutants generated by random mutagenesis was analyzed. DHFR mutants were fused to GFP, transfected into HEK293 cells and treated with increasing doses of Trimethoprim and Methotrexate for 48 hours. Cell lysates were harvested and immunoblotted using Anti-AcGFP antibody (Clonetech, Mountain View, CA) by western blotting. As shown in FIG. 30A, hDHFR (H131R, E144G) showed low basal expression with DMSO treatment and TMP dose dependent stabilization. A modest TMP dependent stabilization was observed with the mutant Clone C1-8 (hDHFR (117V)) and hDHTFR (Wildtype), although the basal expression in the absence of ligand was still detectable.

[1267] FIG. 30B represents ligand dependent stabilization observed with MTX. In this instance both Clone C1-8 (hDHFR (I17V)) and hDHFR (H131R, E144G) showed low basal expression in the absence of MTX and strong MTX dependent stabilization.

[1268] Dose dependent stabilization was also measured using FACS to measure mean fluorescence intensity (MFI). The MFI values and the stabilization ratios calculated based on the MFIs are presented in Table 69 and 70 respectively.

TABLE 69
Dose response of DHFR mutants

| | | | | | Clone | | Clone |
|---|---|---|---|---|---|---|---|
| TMP | Clone | Clone | Clone | Clone | C2-25 | Clone | C3-9 |
| dose | C1-3 | C1-8 | C1-14 | C2-20 | (E162G, | C3-3 | (H131R, |
| (log M) | (A107V) | (I17V) | (N127Y) | (N186D) | I17G) | (M140I) | E144G) |
| DMSO | 19720 | 2875 | 3581 | 19902 | 1894 | 2957 | 2464 |
| −6.86 | 21870 | 3103 | 3535 | 30758 | 1891 | 2699 | 2530 |
| −6.39 | 28772 | 3648 | 4272 | 30389 | 1964 | 3007 | 2545 |
| −5.91 | 40094 | 5251 | 5987 | 46567 | 2225 | 4213 | 3315 |
| −5.43 | 66181 | 11893 | 13591 | 74231 | 3467 | 6131 | 4738 |
| −4.95 | 82770 | 32011 | 31359 | 120106 | 5053 | 15187 | 8464 |
| −4.48 | 94393 | 48198 | 51745 | 117316 | 22849 | 34447 | 21677 |
| −4.00 | 107654 | 74488 | 74118 | 125048 | 37159 | 64607 | 50560 |

TABLE 70B
Stabilization ratios of DHFR mutants

| | | | | | Clone | | Clone |
|---|---|---|---|---|---|---|---|
| TMP | Clone | Clone | Clone | Clone | C2-25 | Clone | C3-9 |
| dose | C1-3 | C1-8 | C1-14 | C2-20 | (E162G, | C3-3 | (H131R, |
| (log M) | (A107V) | (I17V) | (N127Y) | (N186D) | I17G) | (M140I) | E144G) |
| −6.86 | 1.11 | 1.08 | 0.99 | 1.55 | 1.00 | 0.91 | 1.03 |
| −6.39 | 1.46 | 1.27 | 1.19 | 1.53 | 1.04 | 1.02 | 1.03 |
| −5.91 | 2.03 | 1.83 | 1.67 | 2.34 | 1.17 | 1.42 | 1.35 |
| −5.43 | 3.36 | 4.14 | 3.80 | 3.73 | 1.83 | 2.07 | 1.92 |
| −4.95 | 4.20 | 11.13 | 8.76 | 6.03 | 2.67 | 5.14 | 3.44 |
| −4.48 | 4.79 | 16.76 | 14.45 | 5.89 | 12.06 | 11.65 | 8.80 |
| −4.00 | 5.46 | 25.91 | 20.70 | 6.28 | 19.62 | 21.85 | 20.52 |

[1269] As shown in Table 69 and Table 70, constructs, C1-8, clone 1-14, clone 2-25, clone 3-3 and C3-9 showed robust ligand dependent stabilization over a range of TMP doses demonstrating the tunability of these constructs. Constructs C1-3 and C2-20, showed modest ligand dependent stabilization even at the highest doses of TMP. Further even in the absence of ligand C1-3 and C2-20 showed high basal expression compared to the other constructs tested, indicating that C1-8, clone 1-14, clone 2-25, clone 3-3 and C3-9 may be suitable DDs for further analysis. DHFR mutants were analyzed at a fixed dose over 0-48 hours and analyzed by FACS. The mean fluorescence intensity and destabilizing mutation co-efficient s are shown in Tables 71 and 72 respectively.

TABLE 71
Time course of DHFR mutants

| | | | | | Clone | | Clone |
|---|---|---|---|---|---|---|---|
| | Clone | Clone | Clone | Clone | C2-25 | Clone | C3-9 |
| Time | C1-3 | C1-8 | C1-14 | C2-20 | (E162G, | C3-3 | (H131R, |
| (hours) | (A107V) | (I17V) | (N127Y) | (N186D) | I17G) | (M140I) | E144G) |
| 0 | 31994 | 4698 | 6960 | 38817 | 2529 | 4128 | 3163 |
| 4 | 32734 | 6429 | 9784 | 47867 | 4475 | 6173 | 5508 |
| 8 | 35802 | 9369 | 13441 | 49577 | 8434 | 9731 | 9893 |
| 12 | 42626 | 17719 | 22919 | 62290 | 11759 | 15300 | 12964 |
| 16 | 56181 | 29864 | 35122 | 80947 | 15363 | 23539 | 20010 |
| 20 | 67701 | 40277 | 48327 | 91020 | 22069 | 30451 | 26826 |
| 24 | 80303 | 55735 | 68399 | 126779 | 31618 | 49216 | 35591 |
| 48 | 148033 | 109505 | 141768 | 217925 | 45644 | 88419 | 60171 |

TABLE 72
Stabilization ratios over time of DHFR mutants

| | | | | | Clone | | Clone |
|---|---|---|---|---|---|---|---|
| | Clone | Clone | Clone | Clone | C2-25 | Clone | C3-9 |
| Time | C1-3 | C1-8 | C1-14 | C2-20 | (E162G, | C3-3 | (H131R, |
| (hours) | (A107V) | (I17V) | (N127Y) | (N186D) | I17G) | (M140I) | E144G) |
| 4 | 1.02 | 1.37 | 1.41 | 1.23 | 1.77 | 1.50 | 1.74 |
| 8 | 1.12 | 1.99 | 1.93 | 1.28 | 3.33 | 2.36 | 3.13 |
| 12 | 1.33 | 3.77 | 3.29 | 1.60 | 4.65 | 3.71 | 4.10 |
| 16 | 1.76 | 6.36 | 5.05 | 2.09 | 6.07 | 5.70 | 6.33 |
| 20 | 2.12 | 8.57 | 6.94 | 2.34 | 8.73 | 7.38 | 8.48 |
| 24 | 2.51 | 11.86 | 9.83 | 3.27 | 12.50 | 11.92 | 11.25 |
| 48 | 4.63 | 23.31 | 20.37 | 5.61 | 18.05 | 21.42 | 19.02 |

[1270] Similar to the dose response analysis, it was found that only clones C1-3 and C2-20 showed modest stabilization ratios over time. In contrast, all other constructs tested showed robust stabilization over time upon addition of ligand.

### Example 21. Structural Mapping of Destabilizing Mutations

[1271] Mutations identified by random mutagenesis and analyzed by FACS were mapped onto the H2W3A structure of hDHFR from the protein data bank. Both inhibitors of DHFR, namely Trimethoprim and Methotrexate as well as co-factor, NADP were modelled into the structure of DHFR. The positions of the destabilizing mutations, relative to the ligand and co-factor were visualized. Only constructs that showed destabilization in the absence of ligand and ligand dependent stabilization were chosen for the analysis were chosen. The constructs tested include C1-14 (hDHFR (N127Y)), C1-18 (hDHFR (V9A, S93R, P150L)), C1-21 hDHFR (K185E)), C1-24 (hDHFR (V110A, V136M, K177R)), C1-4 (hDHFR (F59S)), C1-8 (hDHFR (I17V)), C2-15 (hDHFR (K19E, F89L, E181G)), C2-21 (hDHFR (A10V, H88Y)), C2-23 (hDHFR (L23S, V121A, Y157C)), C2-25 (hDHFR (E162G, I176F)), C3-1 (hDHFR (Y178H, E181G)), C3-10 (hDHFR (Y183H, K185E)), C3-22 (hDHFR (T57A, I72A)), C3-3 (hDHFR (M140I)), C3-9 (hDHFR (H131R, E144G)), C4-3 (hDHFR (G21E, I72V, I176T)). Among these, constructs C1-14 (hDHFR (N127Y)), C1-21 hDHFR (K185E)), C1-4 (hDHFR (F59S)), C2-15 (hDHFR (K19E, F89L, E181G)), C2-21 (hDHFR (A10V, H88Y)), C2-25 (hDHFR (E162G, I176F)), C3-1 (hDHFR (Y178H, E181G)), C3-10 (hDHFR (Y183H, K185E)), C3-22 (hDHFR (T57A, I72A)), C3-3 (hDHFR (M140I)), and C4-3 (hDHFR (G21E, I72V, I176T)) were found to be located outside both the ligand and co-factor binding pocket and are present on surface residues. In contrast constructs C3-9 (hDHFR (H131R, E144G)), C1-24 (hDHFR (V110A, V136M, K177R)), C2-23 (hDHFR (L23S, V121A, Y157C)), C1-8 (hDHFR (I17V)), and C1-18 (hDHFR (V9A, S93R, P150L)) were found to be either in or near the ligand and/or co-factor binding pocket, away from the surface. These results suggest that most of the destabilizing mutations are located away from the ligand and co-factor binding pocket and are in surface residues.

### Example 22. Combination Mutation Analysis

[1272] Mutations identified by random mutagenesis were combined with mutations identified by site directed mutagenesis. Constructs OT-DHFRC-029 (I17V, Y122I), OT-hDHFRC-030 (Y122I, M140I), OT-hDHFRC-031 (N127Y, Y122I) and OT-hDHFRC-032 (Y122I, H131R, E144G) were transduced into HCT116 cells and treated with Trimethoprim for 48 hours. Median fluorescence intensity (MFI) was measured by FACS and the results are shown in Table 73.

TABLE 73
Dose response of combination mutants

| TMP | OT-DHFRC-029 | | OT-hDHFRC-030 | | OT-hDHFRC-031 | | OT-hDHFRC-032 | |
|---|---|---|---|---|---|---|---|---|
| dose | | Stabilization | | Stabilization | | Stabilization | | Stabilization |
| (log) | MFI | ratio | MFI | ratio | MFI | ratio | MFI | ratio |
| DMSO | 3041 | — | 2539 | — | 2565 | — | 2627 | — |
| −6.86 | 3439 | 1.13 | 2643 | 1.04 | 2922 | 1.14 | 2704 | 1.03 |
| −6.39 | 4355 | 1.43 | 2618 | 1.03 | 3345 | 1.30 | 2694 | 1.03 |
| −5.91 | 6966 | 2.29 | 2766 | 1.09 | 5576 | 2.17 | 2826 | 1.08 |
| −5.43 | 23454 | 7.71 | 3494 | 1.38 | 15743 | 6.14 | 3246 | 1.24 |
| −4.95 | 66170 | 21.76 | 6641 | 2.62 | 53282 | 20.77 | 5092 | 1.94 |
| −4.48 | 115339 | 37.93 | 20890 | 8.23 | 98805 | 38.52 | 12247 | 4.66 |
| −4 | 158659 | 52.17 | 66732 | 26.28 | 145144 | 56.59 | 49891 | 18.99 |

[1273] As shown in Table 73, all constructs showed very low basal expression compared to the expression obtained in the presence of ligand. In the presence of TMP, constructs OT-DHFRC-029 and 031 showed a good dynamic range of GFP expression. OT-DHFRC-030 and OT-DHFRC-032 showed GFP expression only at the highest doses.

### Example 23. Mutagenesis of DD Hotspots

[1274] The analysis of mutants generated by site directed and random mutagenesis identified amino acid hotspots whose mutation confers destabilization and ligand dependent stabilization properties to DI-FR. To improve the DD characteristics of these constructs, the amino acid at the hotspot position is mutated to any of the known amino acids, including, but not limited to lysine, aspartic acid, glutamic acid, glutamine, asparagine, histidine, serine, threonine, tyrosine, cysteine, methionine, tryptophan, alanine, isoleucine, leucine, phenylalanine, valine, proline, and glycine. A library of hotspot mutations is generated by site directed mutagenesis and each of the mutants in the library is fused to a reporter protein e.g. AcGFP via a linker. The properties of the DDs are analyzed in the presence and absence of ligands via western blot and FACS as previously described. Ligands evaluated include, but are not limited TMP and MTX.

### Example 24. Destabilizing Domains with Improved Ligand Binding

[1275] To improve ligand binding one or more of the residues of dihydrofolate reductase that interact with ligands such as TMP and MTX are mutated. Based on the structural analysis of DHFR bound trimethoprim, key DHFR residues required for binding to TMP were identified. These include aspartic acid at position 22 which contributes to loop charge, glutamic acid at position 31, phenylalanine at position 32 which is in the ligand binding pocket, arginine at position 33 which plays a role in helix orientation, glutamine at position 36 which plays a role in helix orientation, asparagine at position 65 which lines the binding pocket and valine at position 116. These residues were mutated as follows, D22S, E31D, F32M, R33S, Q36S, N65S, and V116I and constructs OT-hDHFRC-027 and OT-hDHFRC-028 are generated. Constructs are introduced by transfection or transduction into cell lines such as HEK293T cells and HCT116 cells. Ligand dependent stabilization of expression is measured by comparing the expression of the constructs in the presence of varying doses of the ligand to the expression of the construct in the absence of the ligand. The kinetics of the ligand dose responsive behavior of OT-DHFRC-027 and OT-DHFRC-028 are compared to other DD constructs described. OT-DHFRC-027 and OT-DHFRC-028 are expected to demonstrate better binding to TMP at lower concentrations of TMP, when compared to wildtype and other DHFR-DD constructs.

### Example 25. Optimizing Biocircuit Behavior

[1276] The biocircuits of the invention comprise multiple modules which can be optimized. Libraries of each of the components is generated to allow for the rapid generation of new constructs with desired behaviors. Ligand pharmacokinetics is a powerful tool for payload specific tuning in vivo, which can be used to shift the ligand response curve of the effector module to the left or right depending on the modulating factors. Several modulating factors are tested, including, but not limited to the ligand dose, concentrations, magnitude, duration, and route of administration. Destabilizing domains can also be modified to improve biocircuit behavior. The destabilizing domain is the core determinant of the dynamic range of the biocircuit. Depending on the DD selected, the ligand response curve of the effector module can be shifted up or down. The nature, position of the DD within the effector module as well as the number of DDs within an effector module are modified. DD selection is also altered depending on its degradation kinetics desired. Promoters that transcriptionally control the expression of the SREs are optimized. Choice of promoter impacts the basal-off state and affects the dynamic range of stabilization. Further, promoter choice contributes to the extent of stabilized payload produced. Other optimizable elements of the biocircuits include vector, translational elements, leader sequence, placement of the components within the SRE, codon selection, protease sites, linkers, and mRNA stability.

### Example 26. DD Regulated Caspase 9

[1277] A caspase 9 polypeptide was linked to the N or C-terminus of FKBP, ecDHFR and hDHFR DDs and cloned into pLVX.IRES. Puro vectors. To test ligand dependent Caspase 9 production, 1 million HEK-293T cells are plated in a 6-well plate in growth media containing DMEM and 10 FBS and incubated overnight at 37° C., 5% CO2. Cells are transiently transfected with 100 ng of DD-Caspase 9 constructs using Lipofectamine 2000 and incubated for 48 hrs. Following the incubation, growth media is exchanged for media containing ligands (Trimethoprim, Methotrexate, or Shield-1, depending on the construct used). Following 24-hour incubation with ligand, cells are lysed and immunoblotted for caspase 9. Increase in Caspase 9 levels with increase in ligand concentrations is indicative of DD mediated regulation of Caspase 9.

### Example 27. Ligand Dependent Stabilization of Luciferase Tagged DHFR DD

[1278] Luciferase tagged DHFR DD constructs allows the in vivo tracking of DHFR DDs and evaluation of in vivo kinetics of destabilization and ligand dependent stabilization. OT-DHFR-023 to OT-DHFR-028 were generated by appending DHFR DDs described herein to luciferase. The constructs were stably transduced into HCT116 cells and seeded into 96-well plates at 2000/well. The cells were incubated with 50 μM TMP or without TMP i.e. vehicle control, for 48 hrs. The cells were lysed, and the luciferase activity was measured. The results are shown in Table 74. The stabilization ratio which is defined as the stabilization ratio was calculated as the fold change in GFP intensity in ligand treated samples compared to treatment with vehicle control (i.e. in the absence of ligand) with the same construct. The parental untransduced HCT116 cells were included in the experiment as a negative control.

TABLE 74
Luciferase activity

| | | | Stabilization |
|---|---|---|---|
| | Vehicle | TMP | Ratio |
| Parental | 1474.7 | 1797.73 | 1.22 |
| OT-DHFR-023 | 584581.1 | 841816.8 | 1.44 |
| OT-DHFR-024 | 246206.7 | 583806.7 | 2.37 |
| OT-DHFR-025 | 308483.2 | 652375.1 | 2.11 |
| OT-DHFR-026 | 350832 | 792842.8 | 2.26 |

[1279] As shown in Table 74, OT-DHFR-024, OT-DHFR-025 and OT-DHFR-026 showed stabilization ratios greater than 2, which is greater than the ratio observed with the parental cells. In contrast, OT-DHFR-023 show a stabilization ratio comparable to the parent cells, indicating that the luciferase expression observed with this construct is not significantly higher than background luciferase expression detected with the assay.

### Example 28: Enhancing DD-Ligand Interaction

[1280] To improve the binding of DHFR DDs to TMP, a mutant library is generated using DHFR (Y122I) as the template. The DDs are tagged to reporter proteins such as GFP. Mutant libraries are generated by error-prone PCR and/or commercially available kits such as GeneMorph II (Agilent, Santa Clara, CA). The libraries are packaged in lentivirus vectors such as pLVX-IRES-puro and are screened for GFP expression in the presence or absence of TMP. Clones from the library that show higher GFP expression than the template, in the presence of TMP, as well as little to no GFP in the absence of ligand.

### Example 29. DD Regulated Recombinant IL12 Expression

[1281] FKBP (DD)-IL12 and DHFR (DD)-IL12 constructs were packaged into pLVX IRES-Puro lentiviral vectors with CMV, EF1a, or PGK promoters or without a promoter. The IL12 consists of two subunits, p40 and p35 which are separated by a linker. A p40 signal sequence was inserted next to the DD or IL12. In several constructs, a furin protease cleavage site or a modified furin site was included.

[1282] HEK293T cells were transiently transfected with 200 ng or 1 μg of FKBP-IL12 plasmids (OT-IL12-001 to OT-IL12-005), and subsequently treated with 10 μM Shield-1 or vehicle control for 6 hours. Culture media was collected from transfected cells and diluted 1:50 to measure IL12 levels using p40 ELISA. The stabilization ratio was defined as fold change in IL12 expression with ligand treatment compared to treatment with DMSO (i.e. in the absence of ligand) with the same construct. Stabilization ratio greater than 1 is desired. The average IL12 ELISA readings and stabilization ratio are presented in Table 75.

TABLE 75
Ligand dependent IL12 induction

| Construct | | 10 μM | Stabilization |
|---|---|---|---|
| ID | Vehicle | Shield-1 | ratio |
| OT-IL12-001 | 1289.61 | 1748.95 | 1.36 |
| OT-IL12-002 | 18.01 | 50.73 | 2.82 |
| OT-IL12-003 | 1762.55 | 2138.25 | 1.21 |
| OT-IL12-004 | 385.95 | 1567.62 | 4.06 |
| OT-IL12-005 | 1188.42 | 2670.80 | 2.25 |
| HEK293T | −12.921 | −22.015 | |

[1283] OT-IL12-002 and OT-IL12-004 showed low level of IL12 expression in the absence of ligand when compared to IL12 levels in HEK 293T parental cells. Treatment with Shield-1 resulted in an increase in IL12 levels in OT-IL12-002, OT-IL12-004, and OT-IL12-005 constructs and a stabilization ratio between 2 and 4. These data show that OT-IL12-002 and OT-IL12-004 are destabilized in the absence of these constructs are stabilized by Shield-1.

[1284] IL12 expression was measured in cells following stable transduction. 500,000 cells stably transduced with OT-IL12-004 were plated in a 12 well plate and incubated overnight in growth media consisting of Dulbecco's Modified Eagle medium (DMEM) and 10% fetal bovine serum (FBS). The next day, cells were treated with 1 μM Shield-1 or vehicle control for 6 or 24 hours. Following treatment with Shield-1, growth media was collected from the cells and diluted 10, 40, 160 or 640 fold and IL12 levels were quantified using IL12-p40 ELISA. The stabilization ratio was defined as fold change in IL12 expression with ligand treatment compared to treatment with DMSO (i.e. in the absence of ligand) with the same construct. Stabilization ratio greater than 1 is desired. The average IL12 ELISA readings and stabilization ratio at 6 hours are presented in Table 76.

TABLE 76
Ligand dependent IL12 induction (6 hours)

| Media | 6 hours | | |
|---|---|---|---|
| dilution | | | Stabilization |
| (fold) | Vehicle | Shield-1 | ratio |
| 10 | 0.17 | 0.58 | 3.35 |
| 40 | 0.10 | 0.26 | 2.62 |
| 160 | 0.08 | 0.12 | 1.41 |
| 640 | 0.09 | 0.08 | 0.93 |

[1285] IL12 stabilization ratio greater than 1 was observed at 10, 40 and 160-fold dilutions of media, indicating that IL12 is stabilized by Shield-1 treatment at these dilutions at 6 hours.

[1286] The average IL12 ELISA readings and stabilization ratio at 24 hours are presented in Table 77.

TABLE 77
Ligand dependent IL12 induction (24 hours)

| Media | 24 hours | | |
|---|---|---|---|
| dilution | | | Stabilization |
| (fold) | Vehicle | Shield-1 | ratio |
| 10 | 0.28 | 1.33 | 4.69 |
| 40 | 0.12 | 0.79 | 6.39 |
| 160 | 0.09 | 0.30 | 3.44 |
| 640 | 0.08 | 0.12 | 1.46 |

[1287] IL12 stabilization ratio was greater than 1 at all media dilutions tested and the highest stabilization ratio was observed at 40-fold dilution of media at 24 hours, suggesting ligand dependent stabilization.

[1288] To evaluate Shield-1 dependent FKBP-1L12 induction over time, 2 million cells were plated in growth medium and incubated overnight in the presence of 1 μM Shield-1 or vehicle control. Cells were then incubated for with the ligand for 2, 4, 6, 8, 24, 48, or 72 hours and growth media was collected for the cells at all time points. Growth media was diluted 400-fold and IL12 levels were measured using IL12 p40 ELISA. The stabilization ratio was defined as fold change in IL12 expression with ligand treatment compared to treatment with DMSO (i.e. in the absence of ligand) with the same construct. Stabilization ratio greater than 1 is desired. Average IL12 ELISA readings and stabilization ratio are presented in Table 78.

TABLE 78
IL12 induction over time

| Time | | | Stabilization |
|---|---|---|---|
| (hrs) | Vehicle | Shield-1 | ratio |
| 2 | 0.13 | 0.18 | 1.41 |
| 4 | 0.14 | 0.26 | 1.89 |
| 6 | 0.13 | 0.29 | 2.30 |
| 8 | 0.14 | 0.28 | 1.99 |
| 24 | 0.18 | 0.99 | 5.47 |
| 48 | 0.23 | 1.79 | 7.71 |
| 72 | 0.26 | 1.63 | 6.28 |

[1289] Stabilization ratio increased over time and peaked at 48 hours, suggesting that IL12 is stabilized by Shield-1 with increasing duration of ligand treatment.

[1290] To evaluate the dependence of FKBP-IL12 production on Shield-1 dose levels, OT-IL12-004 transduced HEK293T cells were plated at different densities (40,000 cells, 20,000 cells, 10,000 cells or 5,000 cells per well) onto a 96-well plate. Following overnight incubation, cells were treated with growth medium containing 0 to 10 μM Shield-1 for 24 hours. Media was then collected, diluted 400-fold and FKBP-IL12 levels were measured using IL12-p40 ELISA. Average IL12 ELISA readings are presented in Table 79.

TABLE 79
Dose and cell number dependent IL12 induction

| Shield-1 | 40000 | 20000 | 10000 | 5000 |
|---|---|---|---|---|
| (μM) | cells/well | cells/well | cells/well | cells/well |
| 10 | 623.77 | 656.70 | 214.11 | 193.62 |
| 3.333333 | 670.64 | 618.10 | 273.74 | 207.55 |
| 1.111111 | 677.27 | 872.24 | 322.56 | 203.71 |
| 0.37037 | 368.17 | 582.71 | 250.49 | 172.50 |
| 0.123457 | 197.29 | 343.34 | 156.98 | 95.92 |
| 0.041152 | 171.50 | 205.68 | 63.79 | 48.89 |
| 0.013717 | 117.25 | 103.56 | 13.30 | −2.35 |
| 0.004572 | 66.34 | 60.58 | 2.11 | −8.53 |
| 0.001524 | 100.43 | 39.55 | −13.58 | −21.76 |
| 0 | 83.49 | 7.92 | −21.76 | −26.97 |

[1291] A dose dependent IL12 induction was observed at all cell numbers tested. IL12 induction increased with Shield-1 up to a dose of 1 μM; following which IL12 induction plateaued. Notably, greater IL12 induction was observed at 2000 and 4000 cells/well.

### Example 30. DD Regulated Recombinant IL12 Mediated Functions in HEK293T Cells

[1292] HEK-Blue sensor cells (InvivoGen, San Diego, CA) were utilized to evaluate whether DD regulated IL12 is capable of regulating signaling downstream of IL12. In these cells, the IL12 receptor, STAT4 and downstream transcriptional elements are linked to a reporter gene such that IL12 signaling can be monitored. One million HEK 293T were transfected with 200 ng of OT-IL12-003 plasmid using Lipofectamine 2000 (Thermo Fisher Scientific, Waltham, MA). 48 hours after transfection, cells were treated with growth media containing 10 μM Shield-1, incubated for another 24 hours, following which, media was collected. 50,000 HEK 293 Blue sensor cells were plated onto 96 well plates and incubated overnight with media (at different dilutions) from Shield-1 treated OT-IL12-003 expressing HEK293T cells. After overnight incubation, 20 μl media was removed from each well and incubated with 180 μl Quanti-Blue reagent (InvivoGen, San Diego, CA) for 30 minutes at 37° C. Absorption was measured at 620 nm using a spectrophotometer. To generate a standard curve, 180 μl Quanti-Blue reagent was mixed with 20 μl of recombinant IL12 at following concentrations 500, 250, 125, 62.5, 31.25, 15.62, 7.8 and 3.9 μg/ml. Functional IL12 concentrations were determined by comparing the optical density of each sample with IL12 standard curve. Measurable levels of functional IL12 were reached with 640-fold dilutions of IL12 containing growth media and further plateaued at higher concentrations of the media (FIG. 31A).

[1293] The dependence of functional IL12 production on the dose of Shield-1 used was measured. 10,000 HEK293T cells stably transduced with OT-IL12-004 were plated onto 96 well plates and treated with growth media containing 10, 3.33, 1.11, 0.37, 0.12, 0.04, 0.01, 0.005, 0.002 or 0 μM Shield-1 for 24 hours. Following Shield-1 treatment, media from cells was diluted 200-fold and 20 μL of the diluted media was added to HEK Blue sensor cells. After overnight incubation, 20 μl of media was removed from each well and incubated with 180 μl Quanti-Blue reagent (InvivoGen, San Diego, CA) for 30 minutes at 37° C. Absorption was measured at 620 nm using a spectrophotometer. To generate a standard curve, 180 μl Quanti-Blue reagent was mixed with 20 μl of recombinant IL12 at following concentrations 500, 250, 125, 62.5, 31.25, 15.62, 7.8 and 3.9 μg/ml. Functional IL12 concentrations were determined by comparing the optical density of each sample with IL12 standard curve. A dose dependent increase in the levels of functional IL12 levels was observed (FIG. 31B).

### Example 31. DD Regulated Recombinant IL12 Expression In Vivo

[1294] SKOV3 tumor cells expressing FBP regulated-IL12 (#OT-IL12-009) or parental cells were implanted into SCID Beige mice (Day 0). Mice implanted with FKBP IL12 were dosed intraperitoneally with Shield-1 (10 mg/kg) or vehicle control on Day 2 and Day 7, while the parental cells were left untreated. Blood samples were collected at 0, 2, 4, 6, 8 and 24 hours after Shield-1 dosing and plasma human IL12 levels were measured using ELISA. The average adjusted concentration of plasma IL12 is presented in FIG. 31C. At Day 2, IL12 levels increased in Shield-1 treatment and the levels were higher than vehicle control at 4, 6, 8, and 24 hours. Maximum IL12 levels were detected in Shield-1 treated mice at 8 hours following treatment. In contrast, at day 7, IL12 levels were very low and almost comparable to the IL12 levels in parental SKOV3 cells.

[1295] The experiment was repeated 28 days following implantation of SKOV3 tumor cells. Mice were split into three groups, with the groups receiving 1, 2 or 3 doses of ligand or vehicle control. Mice received multiple doses with a two-hour interval. Blood samples were collected right before the first dose (0 hours), and 6 hours and 24 hours after the first dosing. Plasma IL12 levels were measured and average IL12 concentrations are shown in FIG. 31D. The two dose and three dosing scheme resulted in higher plasma IL12 levels when compared to vehicle treated samples. Peak plasma IL12 levels was detected at 6 hours following shield-1 treatment with all dosing schemes, and the highest IL12 plasma levels were detected with the three-dose regimen. This demonstrates the ligand dependent stabilization of IL12 in vivo.

### Example 32. DD Regulated IL15

[1296] To test ligand dependent IL15 production, 1 million HEK-293T cells were plated in a 6-well plate in growth media containing DMEM and 10% FBS and incubated overnight at 37° C. at 5% CO2. Cells were then transfected with 100 ng of OT-IL15-001(constitutive) or OT-IL15-002 (ecDHFR-IL15) using Lipofectamine 2000 and incubated for 48 hrs. Following the incubation, media was exchanged for growth medium with 10 μM Trimethoprim or vehicle control and further incubated for 24 hrs. Media was collected and the undiluted samples or samples diluted 4, 16, 256, 1024, 4096 or 16384-fold were tested using human IL15 ELISA. The stabilization ratio was defined as fold change in IL15 expression with ligand treatment compared to treatment with DMSO (i.e. in the absence of ligand) with the same construct. Stabilization ratio greater than 1 is desired. Average IL15 ELISA readings and stabilization ratio are presented in Table 80.

TABLE 80
DD-IL15 induction

| Media | | | |
|---|---|---|---|
| dilution | | 10 μM | Stabilization |
| (fold) | Vehicle | TMP | ratio |
| 1 | 0.396 | 0.820 | 2.073 |
| 4 | 0.154 | 0.287 | 1.867 |
| 16 | 0.074 | 0.116 | 1.567 |
| 64 | 0.056 | 0.073 | 1.301 |
| 256 | 0.053 | 0.057 | 1.075 |
| 1024 | 0.053 | 0.048 | 0.910 |
| 4096 | 0.049 | 0.049 | 0.995 |
| 16384 | 0.050 | 0.049 | 0.994 |

[1297] The 16-fold, 4-fold diluted, and undiluted media samples showed stabilization ratio greater than 1.5, suggesting a Trimethoprim dependent stabilization of IL15 at these dilutions.

### Example 33. In Vitro T Cell Assay Development

[1298] The goal of the study was to determine the T cell stimulation regimen and dose of IL12 needed to maximize T cell persistence and T cell differentiation in vitro, to mimic an in vivo adoptive cell transfer therapy regimen. The study recapitulates the design of the adoptive cell therapy regimen wherein the T cells were initially exposed to the antigen in vitro which results in activation followed by a resting phase and finally in vivo transfer where the T cells encounter the antigen again. T cells were stimulated CD3/CD28 beads or soluble CD3/CD28 on day 0 and the CD3/CD28 stimulus was washed off at the end of 48 hours. Cells were treated with a dose of IL12 ranging from 0.01-1000 ng/mL. On day 9, the Th1 phenotype of the cells was evaluated by examining the frequency of IFNgamma positive CD4+ cells and CD8+ cells. On day 14, cells were divided into two groups—one group received a second CD3/CD28 stimulation and a second group that was not stimulated. On day 16, the Th1 phenotype was evaluated in both groups using FACS. The results for day 16 are presented in FIG. 32. IFN gamma expression was higher in cells that received a CD3/CD28 restimulation on day 14 compared to cells that did not receive second stimulation. This indicates that both antigen restimulation and cytokine exposure are required for the Th1 phenotype. Further, as little as 0.1 ng/mL of IL12 could cause Th1-skewing and IFN gamma production from T cells in vitro, and higher doses of IL12 further improved this effect.

### Example 34. Measuring Human T Cell Responses In Vitro and In Vivo

[1299] IL12 promotes the differentiation of naïve T cells into Th1 cells which results in the secretion of IFN gamma from T cells. Human T cells were treated with IL12 or left untreated and analyzed by flow cytometry for the expression of IFN gamma and T cell marker CD3. Treatment with IL12 resulted in the differentiation of T cells as measured by an increase in the percentage of IFN gamma positive T cells from 0.21 to 22.3 (see inset of FIG. 33A).

[1300] To test if membrane bound IL15/IL15Ra fusion protein (OT-IL15-008) can induce human T cell expansion, human T cells were transduced with the construct. T cell proliferation was measured by evaluating forward and side scatter of the T cell population using flow cytometry. Transduction with membrane bound IL15/IL15Ra fusion construct resulted in the expansion of human T cells (58.9) compared to control untransfected cells (37.8) (FIG. 33B).

[1301] Tracking T cells following their adoptive transfer is critical to determine their distribution at different sites in the host, their identity and persistence over time. Human T cells were stimulated with CD3/CD28 beads and incubated with 50 U/ml of IL2. Cells were expanded in vitro for 7 days with IL2 supplementation on day 3 and day 5. On day 5, the CD3/CD28 beads were removed and the cells were cultured for two days. On day 7, cells were washed to remove IL2 and 5 million human T cells were injected intravenously into immune compromised, NOD.Cg-Prkdc^{scid} Il2rg^{tm1Wjl}/SzJ mice. Blood samples were obtained 4, 24, 120 and 168 hours after cell transfer. Mice were euthanized 168 hours after cell transfer and the bone marrow and spleen were harvested. Immune cells were isolated from all samples and analyzed for the presence of human T cells using CD3 and CD45 cell surface markers. As shown in FIG. 33C, the percentage of CD3 positive, CD45 positive human T cells in the blood was higher in animals injected with human T cells, especially at 120 and 168 hours. CD3 positive, CD45 positive human T cells were also detected in the spleen and bone marrow of animals injected with human T cells. As expected no CD3 positive, CD45 positive human T cells were detected in control animals that were not injected with human T cells.

[1302] To determine the identity of the T cells following adoptive transfer, blood samples were collected from mice 48 hours after injection. CD4 and CD8 T cells were analyzed for surface expression of CD45RA and CD62L. Both markers are highly expressed in naïve T cells but are lost as the T cells become antigen exposure. As shown in FIG. 33D, human CD4 and CD8 T cells showed high surface expression of both markers prior to injecting into mice, but was lost 48 hours after in vivo cell transfer indicating that the human T cells are exposed to the antigen in vivo.

### Example 35. DD Regulated IL12 Mediated Functions

[1303] DD-IL12 function is characterized in vivo by evaluating the ability of tumor cells expressing these constructs to establish tumors and proliferate under the treatment of corresponding synthetic ligands e.g. Shield-1, Trimethoprim or Methotrexate. 2-10 million HCT-116 cells stably transduced with the constructs are subcutaneously xenografted with 50 matrigel into mice capable of producing functional B and NK cells. Approximately, two weeks after injection, when the tumors reach a size of approximately 300 cubic mm, mice are dosed with corresponding stabilizing ligands e.g. Shield-1, Trimethoprim or Methotrexate at varying concentrations every two days. Shield-1 is injected with a carrier consisting of 10% Dimethylacetamide, 10% Solutol HS15, and 80% saline. Tumor volume and body weight are monitored twice a week and the experiment is terminated once the tumors reach 1000 cubic mm in size. Plasma and tumor samples are collected 8 hours after the last dose of the ligand and IL12 as well as the ligand levels are measured.

[1304] To evaluate the ability of IL12 expressing cells to form tumors, HCT-116 cells stably transduced with DD-IL12 constructs are pretreated with corresponding stabilizing ligands, Shield-1, Trimethoprim or Methotrexate and subsequently xenografted into mice. Reduction in tumor growth and a concomitant increase in IL12 levels in ligand treated mice compared to untreated controls is indicative conditional regulation of IL12 in vivo.

### Example 36. DD Regulated Recombinant IL12 Mediated Functions in T Cells

[1305] Functional responses to DD-IL12 is evaluated in primary human T cells and in human cell lines/transformed hematopoietic cell lines e.g. Raji cells. Human T cells are purified from peripheral blood mononuclear cells (PBMCs) by negative selection using CD4+ T-cell isolation kit (Miltenyi Biotec, Germany). T cells are treated with growth media from HEK 293T cells expressing DD-IL12 constructs for 5 days. Cells are then activated with beads conjugated with—CD3/CD28 beads (Thermo Fisher Scientific, Waltham, MA) at the ratio of 3 beads per T cell and cultured for 3 days. Functional response to DD-IL12 is determined by measuring Interferon gamma in CD3 positive cells using flow cytometry

[1306] IL12 promotes the differentiation of naïve T cells into Th1 cells which results in the secretion of IFN gamma from T cells.

[1307] To evaluate IL12 induced phosphorylation of STAT4 (Signal transducer and activator of transcription 4), human T-cells are isolated from PBMCs and activated with phytohemagglutinin (PHA, 2 μg/ml) for 3 days followed by treatment with 50 IU/ml of Interleukin-2 (IL2) for 24 hrs. Cells are then washed, resuspended in fresh media and rested for 4 hrs. Supernatant from DD-IL12 expressing HEK293T cells is added to the primary cells, followed by incubation for 30 minutes. Cells are then harvested and STAT4 phosphorylation is analyzed using STAT4 antibody (Cell Signaling Technology, Danvers, MA).

### Example 37. Functional Analysis of DD Regulated IL15-IL15Ra Fusion Molecule

[1308] Activation via IL15 can sustain T cell persistence by conferring a survival advantage. In addition, IL15/IL15Ra fusion molecule has been shown to confer a memory phenotype on T cells and increase proliferation of NK cells (Hurton (2016), PNAS, 113: E7788-7797; the contents of which are incorporated herein by reference in their entirety).

[1309] To evaluate signaling by DD regulated IL15-IL15Ra fusion constructs, NK92 cells are incubated with HCT-116 cells expressing DD regulated IL15-IL15Ra fusion constructs. Trans signaling by IL15/IL15Ra is expected to increase STAT5 phosphorylation in NK92, which is measured by western blotting, and by FACS. Proliferation of NK92 cells is also measured.

[1310] To evaluate the effect of DD regulated IL15-IL15Ra fusion constructs on primary T cells, cells are transduced with the fusion constructs. T cell proliferation in the absence of exogenous IL15 supplementation is measured. The T cell memory phenotype is measured by quantifying CD62L expression by FACS.

[1311] To assess if DD-IL15/IL15R expressing T cells maintain prolonged persistence in vivo, DD modified T cells are injected into mice. Constructs are tagged with luciferase reporter to allow in vivo tracking in mice. Mice are treated with vehicle control or corresponding ligand, Shield-1, Trimethoprim or Methotrexate depending on the construct utilized and monitored over a period of 40-50 days using bioluminescent imaging (PerkinElmer, Massachusetts). Mice treated with ligand are expected to retain T cells expressing DD-IL15/IL15Ra while T cells in vehicle control treated animals are not expected to persist.

### Example 38. DD Regulated CD19 CAR Expression and Function in T Cells

[1312] Ligand dependent expression of DD-CD19 CAR constructs is evaluated in primary human T cells and in immortalized/transformed hematopoietic cell lines e.g. Raji cells, Jurkat cells and K562 cells. Human T cells are purified from peripheral blood mononuclear cells (PBMCs) by negative selection using CD4+ T-cell isolation kit (Miltenyi Biotec, Germany). Primary T cells and hematopoietic cell lines are stably transduced with DD-CD19 CAR constructs. Cells are treated with 10 μM Shield-1, 10 μM Trimethoprim, 1 μM Methotrexate or vehicle control and immunoblotted for CD3 Zeta using anti CD247 antibody.

[1313] The production of functional DD-CD19 CAR is analyzed in primary human T cells or human cell lines (NALM6, K562, Jurkat and Raji cells). Cells are incubated with CD19 expressing antigen presenting cells or CD19/Fc fusion protein in the presence of DD stabilizing ligands Shield-1, TMP or MTX. After incubation, cells are stained with fluorescently labelled anti-CD69 antibodies and analyzed by flow cytometry. Cells with high CD69 expression are considered to have a functional DD-CD19 CAR. Functional response to DD-CD19 CAR is also determined by measuring interferon gamma levels using ELISA. DD-CD19 CAR expressing cells are expected to demonstrate higher Interferon gamma levels in the presence of ligand than untreated cells.

[1314] Cytolytic potential of DD-CD19 CAR expressing cells is evaluated in primary human T cells or human cell lines (e.g. NALM6, K562 and Raji) using Chromium-51 Release Assay. Target cells are loaded with of Na₂⁵¹CrO₄, washed twice and resuspended in phenol red-free growth medium. Untreated or ligand treated DD-CD19 CAR and mock transduced cells are coincubated with CD 19 expressing target cells at various effector: target cell ratios, and chromium release into the supernatant is measured using a liquid scintillation counter. Cells with DD-CD19 CAR are expected to demonstrate specific cytolysis only in the presence of ligand. Cells with DD-CD19 CAR in the absence of ligand or mock transfected cells are expected to show minimal cytolytic activity.

[1315] The in vivo antitumor efficacy of DD-CD19 CAR is also evaluated. Immune compromised mice are injected with luciferase expressing human leukemic cell lines (NALM-6). Subsequently, mice are injected with DD-CD19 CAR T cells via tail vein injections. Mice are subdivided into treatment groups and are treated with a range of ligand doses. Two control groups are also included in the study: a control group that did not receive any ligand and another group that did not receive any T cells. Tumor burden as measured by luciferase activity is monitored over time using bioluminescent imaging. Mice treated with DD-CD19 CAR T cells and ligand are expected to have a reduced tumor burden when compared to control animals.

### Example 39. Evaluation of Antitumor Response of DD Regulated Payloads in Syngeneic Mouse Models

[1316] The efficacy of cancer immunotherapy in organisms with intact immune cells is evaluated using syngeneic mouse models e.g. pMEL-1 and 4T1 mouse models. Immune cells such as T cells and NK cells are isolated from syngeneic mice and transduced with DD regulated payloads such as DD-IL2, DD-IL12, DD-IL12 with DD-IL15 or DD1L15-IL15Ra, DD-IL15, DD1L15-IL15Ra, DD-CD19 CAR, and DD-caspase9. Cells are then injected into mice bearing subcutaneous syngeneic tumors and treated with varying concentrations of ligand, Shield-1, Trimethoprim or Methotrexate, depending on the DD used. Mice treated with immune cells transduced with DD regulated payload are expected to have a reduced tumor burden when compared to control animals.

### Example 40. Optimizing Workflow for Discovery of DD-Regulated Immunotherapeutic Agents

[1317] To identify DD-CD19 CAR constructs suitable for immunotherapy, constructs are introduced into cell lines e.g. HEK293T cells and Jurkat cells. The expression of the construct in the presence or absence of the corresponding ligand is tested. Constructs which show low basal expression in the absence of ligand and robust, ligand-dose responsive expression are selected for further analysis. If no DD-CD19 CAR constructs show ligand-dependent expression, then constructs are redesigned and the experiment is repeated till a regulatable construct is identified. Next, the ligand dependent regulation of the DD-CD19 CAR constructs is tested in vitro in primary T cells. If the constructs show low basal expression in the absence of the ligand and ligand dose responsive expression, they are subject to in vivo PK/PD proof of concept experiments. Otherwise, the constructs are redesigned and the new constructs are subject to similar analysis. The constitutively expressing CD19 CAR constructs are transduced into T cells and CD19 CAR expression is measured in parallel to the regulated construct. If no expression is detected in vitro, efforts are refocused on testing DD-CD19 CAR constructs in vitro in T cells. In contrast, if the constitutive constructs show expression, then the expression of CD19 CAR is measured in vivo.

[1318] To test in vivo PK/PD, mice are injected with T cells expressing DD-CD19 CAR constructs and the test group is dosed with the ligand corresponding to the DD, while the control group is dosed with the appropriate vehicle control. Constructs that display ligand-dependent expression of CD19 CAR are selected for in vivo functional proof of concept experiments. Parallel experiments are also conducted using the constitutive CD19 CAR constructs. If constitutive CD19 CAR expression is detected in vivo, then the constructs are selected for functional experiments. If no expression is detected in vivo, then constructs are redesigned.

[1319] Functional analysis in vivo is performed by testing if the constitutive and DD regulated CD19 CAR expressing T cells display anti-tumor activity in a constitutive or ligand dependent manner respectively. If yes, then in vivo proof of concept is achieved and constructs suitable for immunotherapy are identified. If none of the DD regulated constructs show anti-tumor activity, then alternate dosing regimens are explored. If the constitutive CD19 CAR constructs do not show anti-tumor activity, then efforts are focused on identifying DD-CD19 CAR constructs that show in vivo expression in T cells.

### Example 41. Optimizing Workflow for Discovery of DD-Regulated Immunotherapeutic Agents

[1320] To identify DD-IL15/IL15Ra constructs suitable for immunotherapy, constructs are introduced into cell lines e.g. HEK293T cells and Jurkat cells. The expression of the construct in the presence or absence of the corresponding ligand is tested. Constructs which show low basal expression in the absence of ligand and ligand-dose responsive expression are selected for further analysis. If no DD-IL15/IL15Ra constructs show ligand-dependent expression, then constructs are redesigned and the experiment is repeated till a regulatable construct is identified. Next, the ligand dependent regulation of the DD-IL15/IL15Ra constructs is tested in vitro in primary T cells. If the constructs show low basal expression in the absence of the ligand and ligand dose responsive expression, they are subject to in vivo pharmacokinetics/pharmacodynamics (PK/PD) proof of concept experiments. Otherwise, the constructs are redesigned and the new constructs are subject to similar analysis. The constitutively expressing IL15/IL15Ra constructs are transduced into T cells and IL15-IL15Ra expression is measured in parallel to the regulated construct. If no expression is detected in vitro, efforts are refocused on testing DD-IL15/IL15Ra constructs in vitro in T cells. In contrast, if the constitutive constructs show expression, then the expression of IL15/IL15Ra is measured in vivo.

[1321] To test in vivo PK/PD, mice are injected with T cells expressing DD-IL15/IL15Ra constructs and the test group is dosed with the ligand corresponding to the DD, while the control group is dosed with the appropriate vehicle control. Constructs that display ligand-dependent expression of IL15/IL15Ra are selected for in vivo functional proof of concept experiments. Parallel experiments are also conducted using the constitutive IL15/IL15Ra constructs. If constitutive IL15/IL15Ra expression is detected in vivo, then the constructs are selected for functional experiments. If no expression is detected in vivo, then constructs are redesigned.

[1322] The functional analysis in vivo is performed by testing if the constitutive and DD regulated IL15/IL15Ra constructs confer a survival advantage to the expressing T cells in a constitutive or ligand dependent manner respectively. If yes, then in vivo proof of concept is achieved and constructs suitable for immunotherapy are identified. If none of the DD regulated constructs show T cell persistence, then alternate dosing regimens are explored. If the constitutive IL15/IL15Ra constructs do not confer proliferative advantage, then efforts are focused on identifying DD-IL15/IL15Ra constructs that show in vivo expression in T cells.

### Example 42. Optimizing Workflow for Discovery of DD-Regulated Immunotherapeutic Agents

[1323] To identify DD-IL12 constructs suitable for immunotherapy, constructs are introduced into cell lines e.g. HEK293T cells and Jurkat cells. The expression of the construct in the presence or absence of the corresponding ligand is tested. Constructs which show low basal expression in the absence of ligand and ligand-dose responsive regulation are selected for further analysis. If no DD-IL12 constructs show ligand-dependent expression, then constructs are redesigned and the experiment is repeated till a regulatable construct is identified Next, the ligand dependent regulation of the DD-IL12 constructs is tested in vitro in primary T cells. If the constructs show low basal expression in the absence of the ligand and ligand dose responsive expression, they are subject to in vivo PK/PD proof of concept experiments. The constitutively expressing IL12 constructs are transduced into T cells and IL12 expression is measured in parallel to the regulated construct. If no expression is detected in vitro, efforts are refocused on testing DD-IL12 constructs in vitro in T cells. In contrast, if the constitutive constructs show expression, then the expression of IL12 is measured in vivo.

[1324] To test in vivo PK/PD, mice are injected with T cells expressing DD-IL12 constructs and the test group is dosed with the ligand corresponding to the DD, while the control group is dosed with the appropriate vehicle control. IL12 expression is measured in the plasma of animals. Constructs that display ligand-dependent expression of IL12 are selected for in vivo functional proof of concept experiments. Parallel experiments are also conducted using the constitutive IL12 constructs. If constitutive IL12 expression is detected in vivo, then the constructs are selected for functional experiments.

[1325] The functional analysis in vivo is performed by testing if the constitutive and DD regulated IL12 cause a detectable increase in IFN gamma production in the plasma in a constitutive or ligand dependent manner respectively. If yes, then in vivo proof of concept is achieved and constructs suitable for immunotherapy are identified. If none of the DD regulated constructs show IFNgamma, then alternate dosing regimens are explored. If the constitutive IL12 constructs do not produce IFNgamma, then efforts are focused on identifying DD-IL12 constructs that show in vivo expression in T cells.

### Example 43. Co-Expression of DD Regulated Payloads

[1326] Toxicity related to systemic administration of interleukins can be circumvented by using CAR-T cells to deliver interleukins to the target tissue. This combinatorial approach also has greater anti-tumor activity than interleukin and CAR therapy alone. Cells are co-transfected with CD19 CAR (constitutive or DD regulated) and DD-Interleukin e.g. DD-IL12, DD-IL15 and DD-IL15/IL15Ra constructs. Transfected cells are treated with stabilizing ligands depending on the DD utilized. CD19 CAR expression is evaluated by immunoblotting for CD3 zeta. DD-IL12, DD-IL15 and DD-IL15/IL15Ra expression in the media is measured by ELISA.

### Example 44. Co-Expression of DD Regulated Payloads

[1327] The co-expression of DD regulated payloads has the potential to confer greater anti-tumor activity than the single agent alone. Cells are co-transfected with DD-IL12 and DD-IL15 or DD-IL15/IL15Ra constructs. Transfected cells are treated with stabilizing ligands depending on the DD utilized. DD-IL12, DD-IL15 and DD-IL15/IL15Ra expression in the media is measured by ELISA.

### Example 45. Co-Expression of DD Regulated Payloads

[1328] Cells are co-transfected with DD-Interleukin e.g. DD-IL2 and DD Caspase9 or DD FOXP3 constructs. Transfected cells are treated with stabilizing ligands depending on the DD utilized. DD-IL2, expression in the media is measured by ELISA. FOXP3 and caspase 9 expression are evaluated by immunoblotting for FOXP3 and caspase 9 respectively.

### Example 46. CAR Expression and Functionality in T Cells

[1329] Primary T cells were transduced with CD19 CAR constructs. Surface expression of CD19 CAR construct was measured using Fluorescence activated cell sorting (FACS) with Protein L-Biotin-Strepavidin-Allophycocyanin which binds to the kappa light chain of the CAR (ThermoFisher Scientific, Waltham, MA). To determine the percentage of the CD4 and CD8 sub populations of CAR T cells, cells were analyzed by anti CD4, anti CD8 antibodies and Protein L. As shown in FIG. 34A, 67.3% of CAR positive cells obtained were CD4 positive, while only 14.2% cells were CD8 positive.

[1330] To test the ability of CD19 CAR cells to kill target cells, primary T cell populations transduced with OT-CD19N-001 or OT-CD19N-017 were cocultured with K562 cells expressing CD19 (target cells) at a ratio of 5:1. Additional control combinations of T cells and target cells were also set up. These included CAR expressing T cells co cultured with K562 cells, T cells co cultured with K562 cells expressing CD19 and K562 cells expressing CD19 without T cell co culture. K562 cells were fluorescently labelled with NucLight Red and co cultured with T cells for 30 hours. Cell death was monitored by labelling cells with Annexin V and K562 target cell death was measured by evaluating Annexin V staining in NucLight Red positive cells. The ratio of Annexin V staining per target cell area was calculated. As shown in FIG. 34B, OT-CD19N-001 or OT-CD19N-017 expressing T cells were effective in killing target K562 cells expressing CD19. A low level of target cell killing was observed when untransduced T cells were cocultured with CD19 expressing target cells. As expected, cell death was minimal in the co-culture of OT-CD19N-001 expressing T cells and K562 cells (without CD19 expression). These data show that CD19 CAR cells are effective in killing their corresponding target cells.

### Example 47. Regulated Expression of IL15-IL15Ra in T Cells

[1331] DD regulated IL15-IL15Ra constructs such as OT-IL15-009 or constitutively expressed constructs such as OT-IL15-008 were transduced into T cells such as primary T cells or SupT1 cells. The transduction was carried out at two different lentivirus concentrations, 5 μl and 20 μl for the DD regulated construct using Lentiboost™ (Sirion Biotech, Germany). 4 days after transduction, cells were treated with 10 μM TMP or DMSO control for 24 and 48 hours. Samples were analyzed with an anti IL15Ra antibody using FACS. Additional controls samples such as cells treated with Lentiboost only, untransduced cells treated with DMSO or TMP, and Isotype controls were included in the FACS analysis. The FACS results are depicted in FIG. 35A for 24 hours of TMP treatment and in FIG. 35B for 48 hours of TMP treatment. In both figures, DMSO-A and TMP-A represent cells treated with 5 μl of lentivirus and DMSO-B and TMP-B represent cells treated with 20 μl of lentivirus. Treatment of T cells expressing OT-IL15-009 with TMP for 24 hours resulted in an increase in the expression of IL15Ra in T cells with both doses of lentivirus used. Additionally, very low levels of IL15Ra were detected in the DMSO treated samples under the same conditions as well as in the untransduced T cells. As expected, the constitutively expressed construct, OT-IL15-008 showed high expression of IL15Ra. TMP dependent expression of OT-IL15-009 was not observed in SupT1 cells (FIG. 35A). Similar results were observed for both T cells and SupT1 cells at 48 hours (FIG. 35B). These results show that tight regulation of IL15-IL15Ra constructs can be achieved in primary T cells.

[1332] The surface expression of IL15 and IL15Ra was measured for OT-IL15-008 and OT-IL15-009. The percentage of cells expressing IL15, IL15Ra or both on the cell surface is presented in Table 81.

TABLE 81
Surface expression of IL15 and IL15Ra

| | % Positive cells | |
|---|---|---|
| | OT-IL15-008 | OT-IL15-009 |
| IL15 and IL15Ra positive | 2.03 | 0.51 |
| IL15Ra positive | 13.0 | 15.8 |
| IL15 positive | 0.29 | 0.60 |

[1333] As shown in Table 81, the percentage of cells with detectable surface expression of IL15 and IL15Ra was less than 5% with both constructs. Further, the percentage of cells with surface expression of IL15Ra was much higher than the percentage of cells with detectable surface expression of IL15.

[1334] The effect of increasing doses of TMP on IL15Ra expression in T cells was measured using the OT-IL15-009 construct. T cells were treated with a range of doses of TMP starting from 0.156 μM to 160 μM for 24 hours. IL15Ra expression was measured using FACS. As shown in FIG. 35C, the percentage of IL15Ra expressing T cells with OT-IL15-009 cells was detected even at the lowest concentration of TMP and the percentage of IL15Ra positive cells at the lowest concentration of TMP was higher than the untreated control. An increase in the percentage of IL15Ra cells with increasing doses of TMP was observed.

### Example 48. Effect of IL15-IL15Ra on T Cell Persistence and T Cell Memory Phenotype

[1335] The effect of constitutively expressed IL15-IL15Ra fusion constructs on T cell persistence was measured in NSG mice. T cells were transduced with OT-IL15-008 and 4 million T cells were injected intravenously into NSG mice (number of mice=3). As a control, additional mice were injected with untransduced T cells. Blood samples were obtained from mice at 2, 3, 4, 5 and 6 weeks and analyzed by FACS for the presence of CD8 and/or CD4 positive human T cells expressing IL15 and IL15Ra. The percentage of human T cells in the blood was calculated as the percentage of total T cells i.e. human T cells (measured using anti-human CD45 antibody) and the mouse T cells and endothelial cells (measured using the anti-mouse CD45 antibody). As shown in FIG. 36A, the percentage of T cells in the blood at 2 weeks was greater in mice injected with T cells expressing OT-IL15-008 compared to control mice that were injected with untransduced T cells. This observed increase in T cells decreased over 3,4, and 5 weeks, and the final percentage of T cells at 6 weeks was comparable between the two cohorts. At 6 weeks, one of the mice injected with OT-IL15-008 transduced T cells showed a higher percentage of human T cells in the blood, which may represent a graft versus host disease response. Thus, at 2 weeks, the frequency of human T cells in the blood is increased in the blood of mice injected with OT-IL15-008 transduced T cells.

[1336] The number of T cells in the blood during the experiment was measured by comparing the number of human T cells in 50 μL of mouse blood was measured in the blood samples by FACS using anti-human CD45 antibody as a marker for human T cells and anti-murine CD3 antibody as a marker for murine endothelial cells. As shown in FIG. 36B, the number of human T cells in the blood increased at 2 weeks in mice injected with OT-IL15-008 transduced T cells, as compared to mice injected with untransduced T cells. The differential between the two cohorts was diminished at 3 weeks and 4 weeks. At 6 weeks, one of the mice injected with OT-IL15-008 transduced T cells showed a higher number of human T cells in the blood. Thus, at 2 weeks, the frequency and number of human T cells in the blood is increased in the blood of mice injected with OT-IL15-008 transduced T cells supporting the role of IL15-IL15Ra fusion proteins in T cell persistence. The increased T cell frequency and number observed at 6 weeks in one of the mice may be due to graft versus host disease.

[1337] The effect of OT-IL15-008 expression on the CD4 and CD8 subset of T cells was measured prior to injecting into mice (Week 0) and 2 weeks after injection. As shown in FIG. 36C, the ratio of CD8 and CD4 cells was 1:1 prior to injecting into mice. However, at 2 weeks, the proportion of CD8 positive cells was much higher than the CD4 positive cells in the transduced cells, indicating that OT-IL15-008 causes a preferential expansion of CD8 positive cells. The expression of the OT-IL15-008 construct within the CD4 and CD8 subsets was measured using anti IL15Ra antibody. As shown in FIG. 36D, prior to injections, 25% of the OT-IL15-008 transduced CD4 T cells and CD8 T cells expressed IL15Ra. At week 2, the percentage of IL15Ra positive CD4 and CD8 T cells increased to 80% indicating a preferential expansion of T cells transduced with OT-IL15-008. As expected, untransduced control T cells were negative for IL15Ra expression.

### Example 49. IL12 Dependent, Re-Stimulation Independent Th1 Markers

[1338] T cells require T cell receptor restimulation in vivo or in vitro stimulation with CD3/CD28 to produce IFNgamma. To study the effect of IL12 activity on T cells in the absence of restimulation, several T cell markers were explored. T cells were expanded using one of the following 4 expansions strategies (i) Day 10 cytokine switch from IL2 to IL12, CD3/CD28 stimulation from day 0 to day 10 with no restimulation (ii) Day 10 cytokine switch from IL2 to IL12, CD3/CD28 stimulation from day 0 to day 10 and restimulation at with CD3/CD28 from day 12 to day 14 (iii) Day 10 cytokine switch from IL2 to IL12, CD3/CD28 stimulation from day 0 to day 3 with no restimulation (iv) Day 10 cytokine switch from IL2 to IL12, CD3/CD28 stimulation from day 0 to day 3 and restimulation at with CD3/CD28 from day 12 to day 14. Markers tested include CD69, IFNg, Perforin, CXCR3, Granzyme B, CCR5, CXCR6, Ki-67 and T-bet. IFNg appears to be the most robust and consistent marker for IL12 activity on human T cells, but requires re-stimulation of T cells to induce production. Th1 markers which increase in response to IL12 in the absence of re-stimulation and IL2 (similar to in vivo conditions) include Ki-67, T-bet, Perforin, CXCR3, and CCR5.

### Example 50. Effect of Cytokines on NK Cell Proliferation and Activation

[1339] Immune cells such as Natural Killer cells depend on cytokines such as IL15 for their proliferation and survival. This dependence on cytokines can be used to test the functionality of DD regulated or constitutively expressed cytokines and cytokine fusion proteins.

[1340] The dependency of the NK-92 cells on cytokines for activation was tested. Cells were initially cultured for 3 days with IL2, following which, cells were washed twice and cultured in media without IL2 for 7 hours. The cells were cultured for 18 hours in the presence of IL12 (10 ng/ml) or varying concentrations of IL15 (100 ng/ml, 20 ng/ml, 4 ng/ml, 0.8 ng/ml, 0.16 ng/ml, 0.032 ng/ml, 0.0064 ng/ml and 0.00128 ng/ml). NK-92 cell activation in response to IL15 and IL12 treatment was evaluated by FACS analysis using a panel of markers whose increased expression is associated with NK activation. These include NKG2D, CD71, CD69; chemokine receptors such as CCR5, CXCR4, and CXCR3, Perforin, Granzyme B and Interferon gamma (IFNg). Prior to FACS analysis for IFNg, cells were cultured for 4 hours with Brefeldin A. NK cells respond to external stimuli such as cytokines in their environment through the phosphorylation of proteins JAK/STAT, ERK, and p38/MAPK pathways which are important for cell activation, signaling and differentiation pathways. The phosphorylation of AKT, STAT3 and STAT5 in response to cytokine addition was measured by FACS. Since phosphorylation events are transient NK-92 cells were treated with the cytokines for 15 or 60 minutes, prior to the analysis. The fold change in mean fluorescence intensities compared to untreated for IL15 treatment are presented in Table 82.

TABLE 82
IL15 induced markers

| IL15 dose | | | | Granzyme | pSTAT5 | pSTAT5 | |
|---|---|---|---|---|---|---|---|
| (ng/ml) | CD69 | CXCR4 | Perforin | B | (15 mins) | (60 mins) | IFNgamma |
| 100 | 1.91 | 3.87 | 1.67 | 1.48 | 1.98 | 2.34 | 9.00 |
| 20 | 2.10 | 3.62 | 1.57 | 1.40 | 1.96 | 2.35 | 5.55 |
| 4 | 1.59 | 3.03 | 1.28 | 1.16 | 1.81 | 2.35 | 2.76 |
| 0.8 | 1.18 | 2.10 | 1.16 | 1.09 | 1.76 | 2.17 | 1.92 |
| 0.16 | 0.99 | 1.41 | 1.04 | 1.03 | 1.44 | 2.08 | 2.41 |
| 0.032 | 1.05 | 1.14 | 0.92 | 0.92 | 1.23 | 1.67 | 0.95 |
| 0.0064 | 1.11 | 1.19 | 0.79 | 0.78 | 1.03 | 1.26 | 0.85 |
| 0.00128 | 1.07 | 1.15 | 0.85 | 0.88 | 0.99 | 1.04 | 1.19 |

[1341] Treatment with IL15 resulted in an increase in the expression of CD69, CXCR4, Perforin, Granzyme B, and IFNg. The effect of IL15 on these markers was dose dependent with a higher dose of IL15 resulting in a corresponding upregulation of markers. Phosphorylation of STAT5 was increased both at 15 and 60 minutes after the addition of IL2 or IL15. Taken together, these results show that cytokines can activate NK cells.

[1342] The fold change in activation markers observed with IL12 treatment are shown in Table 83.

TABLE 83
IL12 induced markers

| Marker | Fold change |
|---|---|
| CCR5 | 1.60 |
| Perforin | 1.67 |
| Granzyme | 1.87 |
| IFNg | 1.74 |
| IFNg (supernatant) | 666.15 |

[1343] Treatment with IL12 resulted in an increase in the expression of markers CD69, CCR5, Perforin, Granzyme B, and IFNgamma. Further, IFNg levels secreted by NK-92 cells into the media higher than untreated controls upon treatment with IL12. Treatment with IL2 resulted in an increase in the expression of CXCR4, Perforin, Granzyme B, and IFNg. Further, IFNg levels secreted by NK-92 cells into the supernatant was higher than untreated controls upon treatment with IL2.

### Example 51. Effect of IL15 on NK Cell Proliferation and Activation

[1344] Immune cells such as Natural Killer cells depend on cytokines such as IL15 for their proliferation and survival. This dependence on cytokines can be used to test the functionality of DD regulated or constitutively expressed cytokines and cytokine fusion proteins.

[1345] The dependency of the NK-92 cells on cytokines for activation was tested. Cells were initially cultured for 3 days with IL2, following which, cells were washed twice and cultured in media without IL2 for 7 hours. The cells were cultured for 18 hours in the presence of varying concentrations of IL15 (100 ng/ml, 20 ng/ml, 4 ng/ml, 0.8 ng/ml, 0.16 ng/ml, 0.032 ng/ml, 0.0064 ng/ml and 0.00128 ng/ml). NK-92 cell activation in response to IL15 treatment was evaluated by FACS analysis using a panel of markers whose increased expression is associated with NK activation. These include NKG2D, CD71, CD69; chemokine receptors such as CCR5, CXCR4, and CXCR3, Perforin, Granzyme B and Interferon gamma (IFNg). Prior to FACS analysis for IFNg, cells were cultured for 4 hours with Brefeldin A. NK cells respond to external stimuli such as cytokines in their environment through the phosphorylation of proteins JAK/STAT, ERK, and p38/MAPK pathways which are important for cell activation, signaling and differentiation pathways. The phosphorylation of AKT, STAT3 and STAT5 in response to cytokine addition was measured by FACS. Since phosphorylation events are transient NK-92 cells were treated with the cytokines for 15 or 60 minutes, prior to the analysis. The fold change in mean fluorescence intensities compared to untreated are presented in Table 84.

TABLE 84
NK cell activation markers

| IL15 dose | | | | Granzyme | pSTAT5 | pSTAT5 | |
|---|---|---|---|---|---|---|---|
| (ng/ml) | CD69 | CXCR4 | Perforin | B | (15 mins) | (60 mins) | IFNgamma |
| 100 | 1.91 | 3.87 | 1.67 | 1.48 | 1.98 | 2.34 | 9.00 |
| 20 | 2.10 | 3.62 | 1.57 | 1.40 | 1.96 | 2.35 | 5.55 |
| 4 | 1.59 | 3.03 | 1.28 | 1.16 | 1.81 | 2.35 | 2.76 |
| 0.8 | 1.18 | 2.10 | 1.16 | 1.09 | 1.76 | 2.17 | 1.92 |
| 0.16 | 0.99 | 1.41 | 1.04 | 1.03 | 1.44 | 2.08 | 2.41 |
| 0.032 | 1.05 | 1.14 | 0.92 | 0.92 | 1.23 | 1.67 | 0.95 |
| 0.0064 | 1.11 | 1.19 | 0.79 | 0.78 | 1.03 | 1.26 | 0.85 |
| 0.00128 | 1.07 | 1.15 | 0.85 | 0.88 | 0.99 | 1.04 | 1.19 |

[1346] Treatment with IL15 resulted in an increase in the expression of CD69, CXCR4, Perforin, Granzyme B, and IFNg. The effect of IL15 on these markers was dose dependent with a higher dose of IL15 resulting in a corresponding upregulation of markers. Phosphorylation of STAT5 was increased both at 15 and 60 minutes after the addition of IL2 or IL15. Taken together, these results show that cytokines can activate NK cells.

[1347] The dependency of immune cells on cytokines for proliferation was tested in NK-92 cells and T cell lines Jurkat cells and SupT1 cells. Cells were seeded at 40,000 per well and cultured in the presence of IL2 or IL15 for 3 days. As shown in FIG. 64, the number of NK-92 cells decreased with time in the untreated cells. However, treatment with either IL2 or IL15 increased cell numbers. In contrast, the cell numbers obtained with cytokine treatment in SupT1 and Jurkat cells was comparable to the untreated control. Thus, NK-92 cells depend on cytokines for survival.

### Example 52. Effect of Cytokines on Immune Cell Proliferation and Activation

[1348] Immune cells such as Natural Killer cells depend on cytokines such as IL2 for their proliferation and survival. This dependence on cytokines can be used to test the functionality of DD regulated or constitutively expressed cytokines and cytokine fusion proteins.

[1349] The dependency of the NK-92 cells on cytokines for activation was tested. Cells were initially cultured for 3 days with IL2, following which cells were washed twice and cultured in media without IL2 for 7 hours. The cells were cultured for 18 hours in the presence of IL2 (100 μg/ml). NK-92 cell activation in response to cytokine treatment was evaluated by FACS analysis of a panel of markers whose increased expression is associated with NK activation. These include NKG2D, CD71, CD69; chemokine receptors such as CCR5, CXCR4, and CXCR3, Perforin, Granzyme B and Interferon gamma (IFNg). Prior to FACS for IFNg, cells were cultured for 4 hours with Brefeldin A. IFNg levels were also measured in the media. NK cells respond to external stimuli such as cytokines in their environment through the phosphorylation of proteins JAK/STAT, ERK, and p38/MAPK pathways which are important for cell activation, signalling and differentiation pathways. The phosphorylation of AKT, STAT3 and STAT5 in response to cytokine addition was measured by FACS. Since phosphorylation events are transient NK-92 cells were treated with the cytokines for 15 or 60 minutes, prior to the analysis. The fold change in mean fluorescence intensities compared to untreated for IL2 treatment for select markers are presented in Table 85.

TABLE 85
IL2-induced markers

| Marker | | Fold change |
|---|---|---|
| CD69 | | 1.60 |
| CXCR4 | | 3.56 |
| Perforin | | 1.72 |
| Granzyme | | 1.62 |
| IFNg | (cellular) | 1.15 |
| IFNg | (Supernatant) | 7.43 |
| pAKT | (15 mins) | 1.23 |
| pAKT | (60 mins) | 1.34 |
| pSTAT3 | (15 mins) | 1.19 |
| pSTAT3 | (60 mins) | 1.38 |
| pSTAT5 | (15 mins) | 1.90 |

[1350] Treatment with IL2 resulted in an increase in an increase in the expression of CD69, CXCR4, Perforin, Granzyme B, and IFNg. Further, IFNg levels secreted by NK-92 cells into the media higher than untreated controls upon treatment with IL2. Phosphorylation of STAT5 was increased both at 15 and 60 minutes after the addition of IL2. A modest increase in phospho AKT and STAT3 was observed. Taken together, these results show that cytokines can activate NK cells.

[1351] The dependency of immune cells on cytokines for proliferation was tested in NK-92 cells (natural killer cell line) and T cell lines Jurkat cells and SupT1 cells. Cells were seeded at 40,000 per well and cultured in the presence of IL2 or IL15 for 3 days. The number of NK-92 cells decreased with time in the untreated cells. However, treatment with IL2 increased cell numbers. In contrast, the cell numbers obtained with cytokine treatment in SupT1 and Jurkat cells was comparable to the untreated control. Thus, NK-92 cells depend on cytokines for survival.

### Example 53. Effect of Cytokines on T Cell Expansion and Activation

[1352] To test the requirement of IL2 and IL12 for T cells expansion and activation, T cells were stimulated with soluble CD3/CD28, CD3/CD28 Dynabeads or left unstimulated for two days. Each of these groups was further split into two sub groups. One sub group was treated with IL2 and 100 ng/ml of IL12 while the second sub group was treated with IL2 only for the duration of the stimulation. For the soluble CD3/CD28 stimulated cells, a third subgroup that was only treated with 100 ng/ml of IL12 was also included. T cell expansion over the course of 14 days was measured and the fold change in T cells expansion is shown in FIG. 37A. CD3/CD28 dynabeads plus IL2 with or without IL12 had the most profound impact on T cell expansion followed by the T cells treated with soluble CD3/CD28 plus IL2 with or without IL12. Unstimulated cells and cells treated with soluble CD3/CD28 cells that did receive IL2 treatment were unable to expand over the course of the experiment. These results show that IL2 is required for T cell expansion, but IL12 may be dispensable.

[1353] The effect of IL12 on T cell activation was measured by determining the frequency of IFNgamma positive CD4+ and CD8+ T cells. IFNg is produced by activated T cells. Three different stimulation protocols were used. In the first protocol, cells were stimulated with CD3/CD28 dynabeads for 2 days, following which the beads were washed off and the cells were treated with varying concentrations of IL12 for 7 days (from day 2 to day 9). At day 9, cells were restimulated with soluble CD3/CD28 and the frequency of IFNgamma positive cells was determined by FACS. The results are presented in FIG. 37B as the percentage of cells. In the second protocol, following 2 day CD3/CD28 dynabeads stimulation, T cells were maintained in culture for a longer duration of 14 days i.e. from day 2 to day 16. At day 16, cells were restimulated with soluble CD3/CD28. At day 16, the frequency of IFNgamma positive cells was measured. The results are presented in FIG. 37C as the percentage of cells. In the third protocol, T cells were initially stimulated for 2 days with CD3/CD28 dynabeads and IL2, followed by treatment with IL2 only for 9 days (i.e. from day 2 to day 11), followed by IL12 treatment for 2 to 5 days. In the last two days of the experiment, cells were also restimulated with soluble CD3/CD28. IFNgamma positive CD4 and CD8 cells were measured using FACS. The third protocol mimics the environment that is presented to T cells in adoptive cell therapy, both during in vitro transduction and T cells expansion as well as the in vivo. The results are presented in FIG. 37D as the percentage of cells. In both 7-day treatment with IL12 as well as 14-day treatment with IL12, shown in FIG. 37B and FIG. 37C respectively, restimulation with CD3/CD28 cells at the end of the experiment increased the percentage of IFNgamma positive cells. A half maximum effective concentration (EC50) of IL12 observed with the first protocol for CD8 cells was 50 μg/ml. The EC50 of IL12 observed with the second protocol was 12 μg/ml for CD4 cells and 65 μg/ml for CD8 cells. Long-term culture with CD3/CD28 further increased the dependence on re-stimulation and IL12 for IFNg production.

[1354] The results obtained with the third stimulation protocol are presented in FIG. 37D. Immune cells treated with IL12 for the final 5 days of the experiment combined with CD3/CD28 restimulation showed the highest percentage of IFN gamma positive cells (EC50=24 μg/ml for CD4 cells and 40 μg/ml for CD8 cells), followed by cells that received IL12 for 2 days. Thus, T cells expanded in vitro can later differentiate in response to IL12, but restimulation may be required for IFNg production.

[1355] Taken together these results indicate that IL12 can stimulate IFN production in T cells when restimulated with CD3/CD28.

### Example 54. Promoter Selection for Expression of SREs in T Cells

[1356] The expression of SREs expressed in a vector can be driven by either the retroviral long terminal repeat (LTR) or by cellular or viral promoters located upstream of the SRE. The activity of the promoter may vary with the cell type and thus promoter selection must be optimized for each cell type. To identify optimal promoters for T cells, AcGFP (SEQ ID NO. 3104) was cloned into pLVX. IRES Puro construct with a CMV or an EF1a promoter. Patient derived T cells and Sup T1 cells were transduced with the constructs and GFP expression was measured at day 3 and day 5 after transduction using FACS. As shown in FIG. 38, both the CMV promoter and the EF1a promoter can drive the expression of GFP in SupT1 cells and T cells. The percentage of GFP positive T cells was higher when the GFP expression was driven by CMV promoter compared to an EF1a promoter, both at 3 days and 6 days after transduction. In contrast, the percentage of GFP positive Sup T1 cells was much higher when GFP expression was driven by the EF1a promoter when compared to the CMV promoter. Thus, the optimum promoter suitable for expression differs based on the cell type.

### Example 55. Effect of Ligand on T Cell Proliferation

[1357] The effect of ligands specific to the SREs of the invention on immune cell proliferation was measured to identify concentrations of the ligand that did not inhibit T cell growth or survival. T cells derived from two different donors were stimulated with CD3/CD28 and treated with ligand TMP at doses ranging from 0.04 μM to 160 μM or with control vehicle (DMSO). The percentage of divided cells within the CD4 and the CD8 populations of T cells was measured using FACS. Concentrations of TMP ranging from 0.04 μM to 40 μM showed no effect on the percentage of divided cells within the CD8 and CD4 populations, while 160 μM concentration of TMP resulted in an 70-90% reduction in the percentage of divided cells. Thus, the optimal concentration of TMP for T cell based experiments was determined to be less than 160 μM.

### Example 56. Effect of DD Regulated CD19 CAR on Tonic Signaling

[1358] Chronic antigen activation can result in T cell exhaustion. To test if DD regulated CD19 CAR constructs induce tonic signaling, irradiated K562 cells expressing CD19 are plated into culture plates 12 hours before the addition of T cells expressing DD regulated CD19 CAR constructs with Interleukin 2. Cells are counted every two days and media is replaced. For repeated stimulations, cells are transferred to a new plate with K562-CD19 cells after 24 hours (for two stimulations) or every 12 hours (for four stimulations). For each condition, T cells are counted and analyzed by FACS for CAR, phenotypic and exhaustion markers every 12 hours. DD regulated constructs were analyzed in the presence or absence of ligand. Markers analyzed include CD25 and CD69 for activation status; CD62 and CD45RA for memory status; and exhaustion markers PD1, TIM3 and LAG3. DD regulated CD19 CAR constructs are expected to induce a lower percentage of cells that are positive for all three exhaustion markers—i.e. PD1, TIM3 and LAG3 and a higher percentage of cells that are CD45A+/CD62L+ indicating less differentiated T cells. Constitutively expressed CD19CAR constructs may induce the expression of all three exhaustion markers and may have a more differentiated phenotype with a higher proportion of CD45−/CD62L− and CD45+/CD62L-cells.

### Example 57. Functional Analysis of DD Regulated CD19 CAR

[1359] To test the ability of DD regulated CD19 CAR cells to kill target cells, primary T cell populations transduced with DD regulated CD19 CAR constructs are co cultured with K562 cells expressing CD19 (target cells) at a ratio of 5:1 in the presence or absence of the ligand specific to the DD e.g. Shield-1, TMP or MTX. Additional control combinations of T cells and target cells are also set up. These include DD regulated CAR expressing T cells co cultured with K562 cells (in the presence or absence of the ligand), T cells co cultured with K562 cells expressing CD19 and K562 cells expressing CD19 without T cell co culture. The K562 cells are fluorescently labelled with NucLight Red and co cultured with T cells for 30 hours. Cell death is monitored by labelling cells with Annexin V and the cell death in target K562 cells is monitored by evaluating cells that are positive for both Annexin V and NucLight Red. The ratio of Annexin V staining per target cell area is calculated. DD-CD19CAR expressing T cells are expected to be effective in killing target K562 cells expressing CD19 only in the presence of the ligand specific to the DD. Minimal target cell death is expected to occur when untransduced T cells are cocultured with CD19 expressing target cells; and with DD-CAR T cells (with or without ligand treatment) plus K562 cells (without CD19 expression).

### Example 58. Generation of CD19 scFvs Using the Large Phage Antibody Libraries

### Construction of Primary Phagemid Library

[1360] Total RNA is prepared from 40 different samples of human peripheral blood lymphocytes and cDNA is synthesized using random primers. IgM variable regions are amplified using an IgM 3′ primer and 5′VH primers. Pooled primers are also used to amplify the Vk and VL. An additional PCR step is added to include restriction sites as well as to introduce a region of overlap containing an scFv loxP linker. scFvs are obtained by mixing equimolar amounts of VH and VL genes and performing assembly. The scFvs are then cloned into pDAN5 vectors to obtain a primary library of approximately 108.

### Recombination and Secondary of the Secondary Library

[1361] To induce recombination, bacterial strain BS1365 (which express Cre-recombinases constitutively) are infected with primary phagemid library at an MOI of 20:1. This results in bacteria containing multiple phagemids, each of which encodes different VH and VL genes, which can be recombined by the Cre recombinase. Since the phagemid arise from bacteria containing many different scFv, the phenotype and genotype are not coupled. Phagemids derived from the bacteria are used to infect bacteria that do not express Cre (e.g. DH5a) at a low MOI of ≤0.1 to couple genotype to phenotype.

### CD9 Expression Constructs and Cell Lines

[1362] Human CD19 isoforms described in Table 42 are cloned into appropriate vectors and transfected into cell lines with low endogenous CD19 expression such as K562 and 3T3 cell lines. The CD19 expressing lines i.e. K562-CD19 or 3T3-CD19 cells, are used for positive selection of scFvs in the phage display library. The parental K562 and 3T3 are used for the negative selection.

### Selection of Antibodies Recognizing CD19 on Cell Surface

[1363] The secondary phage display library is pre-cleared by screening with parental cells to remove non-specific binding phages. The precleared phages are incubated with K562-CD19 or 3T3-CD19 cells, and bound phages are recovered and amplified for next round of selection. Three rounds of selection are performed to enrich for CD19 binders. FMC63-distinct scFvs i.e. scFvs that bind to epitopes distinct from FMC63, are selected in a parallel selection process by blocking the FMC63 epitope with an excess of FMC63 antibody.

[1364] The affinity of the scFv to CD19 is a critical aspect that determines the performance of the antibody in pharmacokinetic and immune response assays. Affinity measurements for 96 scFv clones are made using techniques such as ELISA and surface plasma resonance which provide on-rate (Ka), off-rate (Kd), and affinity constant (KD).

[1365] scFv clones with desired off rates are subjected to Sanger sequencing to identify unique clones that bind to CD19 expressing cells but not parental cells. Identified clones are then subject to epitope binning, using a competitive immunoassay that is used to characterize and then sort a library of scFvs against a target protein, e.g. CD19. scFvs against CD19 are tested against all other CD19 scFvs identified from the library, in a pairwise fashion to identify scFvs that prevent the binding of other scFvs to an epitope of CD19 antigen. After a profile is created for each CD19 scFv, a competitive blocking profile is created for each scFv relative to the others. Closely related binning profiles indicate that the antibodies have the same or a closely related epitope are binned together.

[1366] scFvs obtained at each of step of the selection process are subject to deep sequencing methods such as Ion Torrent/MiSeq. Heavy chain CDR3 sequences, including those that do not bind to FMC63 are identified using the Abmining ToolBox (D'Angelo S et al. (2014) MAbs. 6(1): 160-172) and top ranking HCDR3s are identified. HCDR3 specific primers designed from the DNA sequence of the top ranked sequences are then used to amplify scFv clones by inverse PCR and the PCR product is cloned into expression vectors.

### Example 59. CD19 scFv Affinity

[1367] The affinity of the scFv to the CD19 antigen is a critical aspect that determines the performance of the antibody in pharmacokinetic and immune response assays. Affinity measurements are made using techniques such as ELISA and surface plasma resonance which provide on-rate (Ka), off-rate (Kd), and affinity constant (KD).

[1368] Antibodies with varying affinities are identified using cells that have high or low ectopic expression of CD19. K562-CD19 cells and parental K562 cells with low CD19 expression are sorted by FACS using CD19 antibodies e.g. FMC63 to determine surface expression of CD19. Cells are sorted into bottom 5% (i.e. low CD19 expressing cells), top 5% (high CD19 expressing cells) and the rest of the population of cells is categorized as median CD19 expressing cells.

### Example 60. Screening Strategy for Identifying FMC63-Distinct CD19 scFvs

### CD19/Fc Fusion Proteins

[1369] FMC63 binds to human CD19 in the region encoded by exon 2. To identify FMC63-distinct CD19 scFvs, human CD19 (Exon 1-4) or human CD19 (Exon 1,3,4) are fused with IgG to generate CD19-IgG fusion proteins, CD19sIgG1-4 and CD19sIgG1,3,4 respectively. CD19-IgG fusion proteins are used for antibody screening. 96-well plates are coated with capture antibodies and incubated with CD19sIgG1-4 or CD19sIgG1,3,4 fusion protein. The plates are washed and incubated with candidate CD19 scFvs identified in Example 28. The plates are washed again and incubated again with reporter (e.g. Alkaline phosphatase) conjugated detection antibodies and detected using reporter compatible detection methods. Capture antibodies may be antihuman IgG Fc antibodies, or the FMC63 antibody (as a control). The detection antibody may be anti-human IgM antibody. FMC63-distinct CD19 scFvs are expected to bind to (CD19sIgG1,3,4) and (CD19sIgG1-4). In contrast, candidate CD19 scFvs that bind to epitopes that are identical or overlap with FMC63's epitope are expected to only bind to (CD19sIgG1-4).

### Competition Assay

[1370] CD19 expressing K562 cells are incubated with nano molar concentrations of tagged candidate CD19 scFvs e.g. identified in Example 28 and fixed concentration of tagged FMC63 scFv for competition binding assays. Cells are washed and stained with the secondary antibody corresponding to the tag used in the candidate CD19 scFv. Mean fluorescence intensity is measured using flow cytometry. As a negative control, CD19 K562 expressing cells are incubated with varying concentrations of tagged candidate CD19 scFv alone or FMC63 alone. For FMC63-distinct CD19 scFvs, it is expected that there will be no competition for binding to CD19 between the candidate CD19 scFvs and FMC63. Thus, the mean fluorescence intensity of the tagged candidate CD19 scFv is expected to increase with increasing concentrations of the candidate CD19 scFv, while the mean fluorescence intensity of tagged FMC63 antibody is not expected to decrease with increasing concentrations of the candidate CD19 scFv. This would indicate that the FMC63 is not displaced from its epitope by the addition of the candidate CD19 scFv, suggesting distinct binding epitopes. For candidate CD19 scFv that bind to the same epitope as FMC63, a decrease in the fluorescence intensity of FMC63 with increasing concentrations of the candidate CD19 scFv is expected.

### Example 61. Functional Analysis of FMC63-Distinct CD19 CAR Constructs

[1371] FMC63-distinct CD19 scFvs engineered to generate FMC63-distinct CD19 CAR constructs with destabilizing domains, linkers, transmembrane and intracellular domains described in Table 1, and Tables 14-17. The ability of FMC63-distinct CD19 CAR to induce cell activation, cytotoxicity and proliferation is compared to the FMC63-CD19 based CAR constructs in Jurkat cells. Constructs are also analyzed for their ability to induce the upregulation of exhaustion markers, PD1, TIM3 and LAG3, and constructs that are positive for multiple exhaustion markers are excluded from the analysis. Constructs that can induce Jurkat cell activation and cytotoxicity but not exhaustion markers are transduced into T cells and their efficacy is compared with the constitutively expressed FMC63-based CD19 CAR construct. It is expected that DD regulated FMC63-distinct CD19 CAR constructs will demonstrate superior cytotoxic capabilities with minimal tonic signaling as compared to FMC63 CD19 CAR constructs.

### Example 62. Ligand Dependent Target Cell Death Induced by DD Regulated CD19 CAR

[1372] To test the antigen specificity of cell killing by T cells engineered to express constitutive or DD-containing CAR construct, CD19 was ectopically expressed in the antigen negative K562 cell line. CD19 expression was measured using anti-CD19 antibody conjugated to Phycoerythrin (PE). FIG. 39A shows the expression of CD19 in parental K562 cells and K562-CD19 cells, wherein CD19 is ectopically expressed.

[1373] To test the ability of DD regulated CD19 CAR cells to kill target cells, primary T cell populations were transduced with DD regulated CD19 CAR constructs, OT-CD19-024 with human DHFR DD and an EF1a promoter. Transduced T cells were co cultured with K562 cells expressing CD19 (target cells) at a ratio of 5:1 in the presence or absence of TMP (100 μM). Additional control combinations of T cells and target cells were also set up. These included DD regulated CAR expressing T cells co cultured with antigen-negative K562 cells (in the presence or absence of the ligand), untransduced T cells co cultured with K562 cells expressing CD19 and K562 cells expressing CD19 without T cell co culture. The T cells utilized for this experiment were transduced with the OT-CD19-024 construct (or untransduced) and expanded for 11 days using protocols described in previous examples, frozen, thawed and co-cultured with target cells. Target cells were treated with Mitomycin C to prevent their proliferation. The K562 or K562-CD19 target cells stably expressing the fluorescent protein NucLight Red were co cultured with T cells for 300 hours. Cell death was monitored by labelling cells with Annexin V and the cell death in target K562 and K562-CD19 cells was monitored by evaluating cells that were positive for both Annexin V and NucLight Red using the IncuCyte® Live Cell Analysis System (Essen Biosciences, Ann Arbor, MI). The results are presented in FIG. 39B, where the killed target cells represented on the y axis are based on target cells that are positive for both NucLight Red and Annexin V. FIG. 39C, shows the killed target size as measured in (μM/well) at day 5. Target cell killing was observed with the OT-CD19-024 construct only in TMP treated co-cultures of T cells and K562 target cells ectopically expressing CD19. No cell killing was observed in untreated controls of the same co-culture set up and when T cells were co cultured with parental K562 cells that do not express CD19 in the presence or absence of ligand. These data show that regulated CARs display ligand- and target-dependent cell killing with minimal basal off-state.

### Example 63. In Vitro CAR-T Cell Functional Analysis

[1374] The efficacy of T cells expressing DD regulated CD19 CAR constructs in functionally interacting with target cells is evaluated. To interact with the CD19CAR T cells, the chosen target cells express CD19 naturally or ectopically. In this context, target cells which have high endogenous expression of CD19 such as Nalm6, Raji, Reh, Sem, Kopn8, and Daudi cells. Alternatively, target cell lines may be engineered by ectopic expression of CD19 in cell lines that have low endogenous expression of CD19 such as K562. Multiple assays are used to measure functionality. Prior to co culture, the target cells are optionally cultured in the presence of presence of mitomycin C to prevent target cell proliferation. This ensures that target cell growth does not out compete T cell growth. Cytotoxicity assays are used to measure the ability of T cells induce target cell death. Target cells are engineered to express Renilla or Firefly luciferase and co cultured with T cells expressing DD regulated CD19 CAR constructs for 18 to 24 hours in the presence of the ligand related to the DD or vehicle control. At the end of co culture, cells are lysed and luciferase activity is measured using appropriate substrate. Luciferase activity is expected to increase when DD regulated CD19 CAR expressing T cells are co cultured with CD19 expressing target cells in the presence of ligand. Cytotoxicity is not expected in vehicle control cells or when the target cells do not express CD19 are utilized.

[1375] Engagement of the CD19 CAR with CD19 antigen results in the activation of T cells which is measured 24 hours after co culture of CAR expressing T cells and target cells. Activation of T cells is evaluated by measuring levels of IFNg, IL2, and CD69. T cell proliferation in response to antigen mediated T cell activation is measured by labelling T cells with Carboxyfluorescein succinimidyl ester, which is used to trace cells across multiple generations. Labelled T cells are cultured with Mitomycin treated target cells and cell proliferation is tracked over a period of 3 to 5 days. T cell proliferation and activation is expected to increase when DD regulated CD19 CAR expressing T cells are co cultured with CD19 expressing target cells in the presence of ligand. Both parameters are not expected in vehicle control cells or when the target cells do not express CD19 are utilized.

[1376] Activation of T cells results in degranulation, an exocytic process by which cytotoxic T cells release molecules like perforin and granzymes which enable target cell killing. Degranulation is measured by analysis of media for indications of exocytosis e.g. CD107 by FACS and by markers of degranulation such as perforin and granzyme using immunoassays.

### Example 64. Ligand Dependent Target Cell Death Induced by DD Regulated CD19 CAR

[1377] To test the ability of DD regulated CD19 CAR cells to kill target cells, primary T cell populations are transduced with DD regulated CD19 CAR constructs are co cultured with K562 cells expressing CD19 (target cells) at a ratio of 5:1 in the presence or absence of the ligand specific to the DD e.g. Shield-1 (1 μM), TMP (100 μM) or MTX. Constructs with FKBP, ecDHFR or human DHFR DDs may be utilized. Constructs with either CMV, EF1a or PGK promoters may also be used. Multiple combinations of T cells and target cells are set up. These included DD regulated CAR expressing T cells co cultured with K562 cells (in the presence or absence of the ligand), T cells co cultured with K562 cells expressing CD19 and K562 cells expressing CD19 without T cell co culture. Additional controls include target cells only; untransduced T cells; T cells transduced with empty vector. The T cells utilized for this experiment are expanded for 11 days using protocols described in previous examples, frozen, thawed and transduced with the CD19 CAR constructs. Target cells are treated with Mitomycin C to prevent their proliferation. The K562 cells are fluorescently labelled with NucLight Red and co cultured with T cells for 300 hours. Cell death is monitored by labelling cells with Annexin V and the cell death in target K562 cells is monitored by evaluating cells that are positive for both Annexin V and NucLight Red using the IncuCyte® Live Cell Analysis System (Essen Biosciences, Ann Arbor, MI). Target cell killing is expected with the DD regulated CAR constructs only in the presence of ligand and when K562 target cells ectopically expressing CD19 are utilized. No cell killing is expected in untreated controls of the same co-culture set up and when T cells are co cultured with parental K562 cells that do not express CD19 in the presence or absence of ligand. Constitutive constructs are predicted to show cell killing both in the presence of ligand. Cell killing is also not expected in cocultures with untransduced T cells, T cells transduced with empty vector; and cultures of target cells only.

### Example 65. Effect of Ligand on Cytokine Expression

[1378] To study the effect of ligand on the expression of cytokines in regulated CD19 CAR constructs, T cell populations were transduced with empty vector, OT-CD19-017, OT-CD19-023, OT-CD19-024, or OT-CD19-025. 5×10⁴ transduced T cells were co cultured for 48 hours at an E:T (effector to target cell) ratio of 5:1 in the presence or absence of TMP or Shield-1. Target cells were treated with 50 μg/ml of Mitomycin C to prevent their proliferation. The cytokine concentration of IFNγ and IL2 in the media supernatant were determined for each construct using MSD V-PLEX Proinflammatory Panel 1 Human Kit. The readout was obtained using a MESO QuickPlex SQ120. As shown in FIG. 40A, a 6 fold increase in IFNγ concentration was seen with the addition of ligand for OT-CD19-024, and a 2 fold increase in IFNγ concentration was seen with the addition of ligand for OT-CD19-025. As shown in FIG. 40B, a 6 fold increase in IL2 was seen for OT-CD19-024 with the addition of ligand and a 9 fold increase was seen for OT-CD19-025 with TMP.

### Example 66. In Vivo Time Course Study of IL12 Levels in Mice

[1379] HCT116 parental cells or cells transduced with IL12 constructs (OT-IL12-020, OT-IL12-026, or OT-IL12-029) were injected into immune compromised CD1 nude mice (n=4 per group) according to the study design in Table 86 below.

TABLE 86
Study Design

| | | Concen- | Route of Day |
|---|---|---|---|
| HCT116 cells | Day 15 Dose | tration | 15 Dose |
| OT-IL12-026 | Vehicle | n/a | Intraperitoneal |
| | Shield-1 (1x) | 10 mg/kg | Intraperitoneal |
| | Shield-1 (3x, 2 h apart) | 10 mg/kg | Intraperitoneal |
| OT-IL12-029 | Vehicle | n/a | Intraperitoneal |
| | Shield-1 (1x) | 10 mg/kg | Intraperitoneal |
| | Shield-1 (3x, 2 h apart) | 10 mg/kg | Intraperitoneal |
| OT-IL12-020 | Vehicle | n/a | Intraperitoneal |
| | Shield-1 (1x) | 10 mg/kg | Intraperitoneal |
| Parental | Vehicle | n/a | Intraperitoneal |
| | Shield-1 (1x) | 10 mg/kg | Intraperitoneal |

[1380] The mice were bled (blood harvested for plasma PK and IL12 MSD) at day 14 after subcutaneous injection of 5×10⁶ cells (day 0), and 6, 10, and 24 hours post the day 15 dosing. At the end of the study, tumor and kidneys were minced with the razor in 500 ul PBS, spun down, and supernatant isolated for IL12 Meso Scale Diagnostic (MSD) assay.

[1381] As shown in FIG. 41A, the basal plasma IL12 levels of the DD constructs were high, but the OT-IL12-026 and OT-IL12-029 constructs were still 100-fold lower than the constitutive (OT-IL12-020) construct. When FIG. 41A is shown as fold change from pre-dose plasma, OT-IL12-026 shows regulation at 6 and 10 hours. FIG. 41B and FIG. 41C show that IL12 is detectable in kidney (FIG. 41B) and tumor (FIG. 41C) and the levels coordinate with plasma levels.

### Example 67. In Vivo Time Course Study of IL12 Levels in Mice

[1382] HCT116 parental cells or cells transduced with IL12 constructs (OT-IL12-020, OT-IL12-026) were injected subcutaneously into Matrigel plus in female NSG mice (implant 200 ul matrigel plug with 1×10⁷ cells) (n=4) according to the study design in Table 87 below.

TABLE 87
Study Design

| HCT116 cells | Dose | Harvest Plug | Coverage above EC50 |
|---|---|---|---|
| OT-IL12-026 | Vehicle (1x) | 8 hours after 1^{st} dose | — |
| | Vehicle (1x) | 24 hours after 1^{st} dose | — |
| | AquaShield-100 mg/kg (1x) | 8 hours after 1^{st} dose | 4 hours |
| | AquaShield-100 mg/kg | 8 hours after 1^{st} dose | 8 hours |
| | (2x, 4 hours between doses) | | |
| | AquaShield-100 mg/kg (1x) | 24 hours after 1^{st} dose | 4 hours |
| | AquaShield-100 mg/kg | 24 hours after 1^{st} dose | 8 hours |
| | (2x, 4 hours between doses) | | |
| | AquaShield-100 mg/kg | 24 hours after 1^{st} dose | 12 hours |
| | (3x, 4 hours between doses) | | |
| OT-IL12-020 | Vehicle (1x) | 24 hours after 1^{st} dose | — |
| Parental | Vehicle (1x) | 24 hours after 1^{st} dose | — |

[1383] Terminal collection of plasma (or IL12 MSD), plug supernatants and kidneys were collected. As shown in FIG. 42A, regulation of IL12 was achieved in vivo with high dose Aquashield. There was less regulation observed in the plasma (FIG. 42B) and there was some flexi-IL12 detected in the kidneys (FIG. 42C).

### Example 68. Shield-I can Induce ˜40-50× Increases in IL12 Production by Primary Human T Cells Transduced with the IL12-026 Construct

[1384] On Day 0, primary human T cells were stimulated with Dynabeads (T-expander CD3/CD28) at a 3:1 bead:cell ratio. The next day, lentiviruses (empty vector (pLVX-EF1a-IRES-Puro), OT-IL12-020 (constitutive), or OT-IL12-026 (regulated)) were added at a multiplicity of infection (MOI) of 10 in the presence of LentiBOOST and 5% FBS. On day 2, the cells were washed to remove the LentiBOOST and the bead:cell ratio was reduced to 1:3, and fresh 10% media and IL2 were added. On days 6, 9, and 13 the cells were counted for equal cell number plating, media replaced, ligand was added, and cells were either left unstimulated or restimulated with soluble ImmunoCult™ Human CD3/CD28 T Cell Activator (StemCell Technologies). After overnight incubation (on days 7, 10, and 14), the supernatants were collected for IL12p40 and p70 MSD assay, and transduction efficiency was analyzed by FACS. OT-IL12-026 T cells were found to be 7% transduced, and OT-IL12-020 (constitutive) T cells were 13% transduced on day 7. Restimulation was shown to increase the expression of IL12 (FIG. 43A). Ligand increased production of IL12 by 10-day expanded OT-IL12-026 expressing T cells by 40-50 fold (FIG. 43B and FIG. 43C).

### Example 69. Dose Response of Shield-I on Transduced T Cells

[1385] Human T cells were activated with CD3/CD28 Dynabeads (Life Technologies) for 1 day prior to transduction with lentiviruses (OT-IL12-026 or vector control), followed by 12-13 days of expansion in culture. T cells that had been transduced with different amounts of virus (4-40 MOI) were exposed to either a dose response of Shield-1 for 24 h (left panel). T cells that had been transduced at an MOI of 14 were treated with 1 uM Shield-1 or vehicle control for increasing amounts of time (right panel). The levels of IL12 that had accumulated in the supernatants (from 100,000 cells per 200 uL media) were measured using human IL12p40 MSD V-plex assay kits (Meso Scale Discovery).

[1386] From the analysis, it was shown that the increase in IL12 production by T cells expressing OT-IL12-026 is dose responsive to the ligand, Shield-1 FIG. 44A, and accumulates over time FIG. 44B.

### Example 70. In Vivo Dose Response, and Repeat Dosing of AquaShield in NSG Mice with Transferred T Cells Expressing OT-IL12-026

[1387] Primary human T cells were stimulated with Dynabeads (T-expander CD3/CD28) at a 3:1 bead:cell ratio. The next day, lentiviruses (OT-IL12-020 (constitutive), OT-IL12-026 (regulated), or vector control) were added at a multiplicity of infection (MOI) of 10 in the presence of LentiBOOST and 5% FBS. The following day, T cells were washed to remove the LentiBOOST and the bead:cell ratio was reduced to 1:3, and fresh 10% media and IL2 were added. The T cells were expanded for a total of 10 days, and then 25×10⁶ vector control or OT-IL12-026 transduced T cells or 10×10⁶ constitutive OT-IL12-020 transduced T cells were transferred into NSG mice (study day 0). Three days after cell transfer, the animals were dosed with either vehicle or AquaShield (10, 50 or 100 mg/kg). Blood was sampled for plasma analysis of IL12p70 by MSD assay at 0, 4, 8, and 24 h post dosing (FIG. 45A). Clear dose responsive increases in plasma IL12 was observed.

[1388] On day 5 post T cell transfer, animals were dosed a second time with AquaShield (FIG. 45B). A second increase in plasma IL12 was observed upon repeat dosing with AquaShield.

### Example 71. In Vivo Regulation of DD-12 Expressed in T Cells

[1389] To determine whether ligand can stabilize DD-IL12 in vivo upon sequential dosing of AquaShield, T cells are transduced with DD-IL12-expressing constructs (OT-IL12-020 or OT-IL12-026) and implanted into mice (n=4 per group) (day 0) as outlined in the study design below.

TABLE 88
Study Design

| Group | Description |
|---|---|
| A | Empty Vector, Day 3-6: oral vehicle daily for 4 days |
| B | OT-IL12-020, Day 3-6: oral vehicle daily for 4 days |
| C | OT-IL12-026: Day 3-6: oral vehicle daily for 4 days |
| D | OT-IL12-026, Day 3-6: Aquashield 50 mg/kg orally daily |
| | for 4 days |
| E | OT-IL12-026, Day 4 and 6: Aquashield 50 mg/kg orally |
| F | Empty Vector, Day 5 and 10: oral vehicle |
| G | OT-IL12-020, Day 5 and 10: oral vehicle |
| H | OT-IL12-026, Day 5 and 10: oral vehicle |
| I | OT-IL12-026, Day 5 and 10: Aquashield 50 mg/kg orally |
| J | OT-IL12-026, Day 10: Aquashield 50 mg/kg orally |

[1390] For each group, a pre-bleed sample is collected as well as samples at 4 hours and 24 hours after each dose. At the end of the study, tissue and organ samples are collected. FACS analysis is conducted to determine cell numbers and Th1 markers.

[1391] On Day 0, primary human T cells were stimulated with Dynabeads (T-expander CD3/CD28) at a 3:1 bead:cell ratio. The next day, lentiviruses (empty vector (pLVX-EF1a-IRES-Puro), OT-IL12-020 (constitutive), or OT-IL12-026 (regulated)) were added at a multiplicity of infection (MOI) of 10 in the presence of LentiBOOST and 5% FBS. On day 2, the cells were washed to remove the LentiBOOST and the bead:cell ratio was reduced to 1:3, and fresh 10% media and IL2 were added.

[1392] In vitro evaluation of these cells is shown under FIG. 46A-FIG. 46C.

[1393] After 10 days of expansion, T cells were injected into NSG mice (12×10⁶ cells injected, cells were 15% (constitutive) and 7.5% (regulated) IL12 positive by FACS). For each group, a pre-bleed sample was collected as well as plasma samples at 4 hours and 24 hours after each dose. At the end of the study, tissue and organ samples are collected. FACS analysis was conducted to determine T cell numbers in the blood and to assess Th1 phenotypic markers.

[1394] As shown in FIG. 46A, IL12 expression in response to sequential pulsed doses of ligand (50 mg/kg Aquashield administered orally on day 4 and 6 (50 mpk Aquashield q48 hr)) was elevated in the plasma of mice with T cells expressing OT-IL12-026 as compared to the vehicle treated controls. T cells expressing the empty vector control did not produce IL12. T cells transduced with OT-IL12-020 (IL12-020), the constitutive control, produced IL12 throughout the time course.

[1395] In FIG. 46B, elevated plasma IL12 expression in response to sequential pulsed doses of ligand (50 mg/kg Aquashield administered orally for 4 days (day 3-6) (50 mpk Aquashield QDx4)) was seen in mice bearing OT-IL12-026 expressing T cells as compared to the vehicle treated controls. Cells transduced with OT-IL12-020 (IL12-020), the constitutive control, produced IL12 throughout the time course.

[1396] FIG. 46C shows the IL12 expression over 11 days for the constitutive construct OT-IL12-020 (IL12-020). Ligand-regulated expression of IL12 from T cells expressing DD-IL12 from the construct OT-IL12-026 was seen in mice treated with 50 mg/kg Aquashield administered orally on day 5 and 10 (50 mpk Aquashield d5/10). T cells expressing the empty vector control did not produce IL12.

[1397] FIG. 46D shows ligand-induced regulation of plasma IL12 expression from T cells expressing DD-IL12 from the construct OT-IL12-026 when mice were treated orally with 50 mg/kg Aquashield on day 10 (50 mpk Aquashield d10). The single ligand pulse increased plasma IL12 levels over those detected in vehicle-treated control mice harboring OT-IL12-026 expressing T cells.

[1398] Regulation of IL12 for all constructs shown in FIG. 46A-FIG. 46D did not impact IFNγ levels, instead the levels of IFNγ gradually rose over time. This is likely due to the exposure of the T cells to IL12 in culture during the in vitro expansion phase. However, ligand-induced regulation of IL12 increased granzyme B (GrB) (FIG. 46E) and perforin expression (FIG. 46F) by CD8+ T cells in vivo at day 7 post in vivo T cell transfer.

### Example 72. Effect of PGK Promoter and N-Terminal FKBP

[1399] HEK293T cells were transiently transfected with Lipofectamine 3000 and 2 ug plasmid DNA each of: OT-IL12-019 (PGK promoter), OT-IL12-020 (EF1alpha promoter), OT-IL12-025 (PGK promoter, C-terminal FKBP domain), OT-IL12-026 (EF1alpha promoter, C-terminal FKBP domain), OT-IL12-046 (N-terminal FKBP). Ligand (1 uM Shield-1) was added one day after transfection, and the cells were further cultured for 2 more days. IL12 secretion into the supernatants was quantitated by IL12p40 MSD assay. Genomic DNA (gDNA) and messenger RNA (mRNA) was purified from the cells. The levels of construct DNA integration into the cellular genome and levels of IL12 mRNA expression were quantitated by qPCR using primers specific to the WPRE element and IL12 within the respective constructs.

[1400] The gDNA qPCR analysis demonstrated that the FKBP DD-containing constructs had integrated to similar levels within the cellular genomes, and that the PGK promoter, as expected, generated less IL12 mRNA expression than the EF1alpha promoter (FIG. 47A).

[1401] Due to the lower levels of mRNA transcription induced by the PGK promoter, the IL12p40 MSD assay also demonstrated that the PGK promoter reduced both basal and peak IL12 levels of secretion as compared to the construct using the EF1alpha promoter. The lower basal levels of IL12 production downstream of the PGK promoter resulted in ˜2 fold improved ligand-induced IL12 regulation as compared with the construct with the EF1alpha promoter (FIG. 47B). More specifically, the ligand-induced regulation of IL12 expression increased from 6-fold to 13-fold with the change from the EF1alpha to the PGK promoter, respectively.

[1402] Constructs containing FKBP either at the N-terminus or at the C-terminus of IL12 were integrated similarly into the cellular genome and generated similar levels of mRNA (FIG. 47A). However, while C-terminal containing FKBP constructs regulate IL12 expression, the N-terminal-containing FKBP construct failed to regulate IL12 expression (FIG. 47B).

### Example 73. Kinetics of Ligand-Dependent Stabilization of DD-IL15-IL15Ra

[1403] The on/off kinetics of ligand-dependent stabilization of DD-IL15-IL15Ra was measured in CD4 positive T cells. T cells were activated with CD3/CD28 beads at 3:1 bead to T cell ratio in 24-well plates for 24 hrs. Lentivirus was added to wells in the presence of LentiBoost reagent, and cells were incubated for another 24 hrs and washed. Cells were resuspended in fresh media, and media was added every 2-3 days to expand and maintain cells at 0.5-1×10⁶/ml. After 7 days of expansion, T cells transduced with the ecDHFR DD-IL15-IL15Ra fusion construct (OT-IL15-009) were treated with 100 μM ecDHFR ligand Trimethoprim (TMP) or vehicle control, DMSO. At multiple time points (i.e., 1, 2, 4, 6, 8, 15, 22 and 24 hrs) after TMP treatment, the transduced T cells were collected and analyzed for IL15Ra surface expression using anti-IL15Ra antibodies by flow cytometry. Untransduced T cells were used as a negative control. The T cells were sorted into CD4 positive and CD8 positive populations and the percentage of IL15Ra positive CD4 positive T cells was analyzed. FIG. 48 shows the kinetics of surface expression of IL15Ra on CD4 T cells after TMP treatment. Among the CD4 positive T cells transduced with the OT-IL15-009 construct, the proportion of cells with surface expression of IL15Ra remained similar for both TMP treated and DMSO treated cells until 2 hrs after TMP treatment, and was comparable to that of untransduced cells. However, from 4 hrs after TMP treatment, the cells transduced with the OT-IL15-009 construct and treated with TMP exhibited an increased proportion of cells with surface expression of IL15Ra. This trend was observed until 22 hours after treatment with TMP. The CD4 positive T cells with surface-expressed IL15Ra cells constituted ˜1% of untransduced cells, indicating that the proportion of cells that expressed endogenous IL15Ra is low.

### Example 74. Ligand-Dependent Stabilization of DD-IL15-IL15Ra Fusion Molecules In Vivo

[1404] To examine whether ligand treatment induces stabilization of the DD-IL15-IL15Ra fusion molecules in vivo, HCT116 cells transduced with the OT-IL15-009 construct were implanted subcutaneously in BALB/c nude mice and treated with TMP. TMP was orally administered to mice at a dose of 100 mg/kg, twice a day for 11 days after implantation, followed by administration of TMP at the dose of 300 mg/kg, twice a day for 6 days. As a negative control, separate mice implanted with HCT116 cells transduced with the OT-IL15-009 construct were treated with the vehicle twice a day for 17 days. At 4 hrs after the last dosing of TMP or the vehicle control, tumors were harvested from the mice and analyzed for the levels of IL15-IL15Ra fusion molecules by western blotting. As shown in FIG. 49, HCT116 tumors harvested from mice treated with TMP exhibited elevated levels of IL15-IL15Ra expression, compared to tumors treated with the vehicle. The GAPDH level was analyzed as a loading control. These data show that administration of ligand enabled stabilization of the DD-IL15-IL15Ra fusion molecule in vivo.

[1405] Consistent with the efficacy of TMP-dependent IL15-IL15Ra stabilization in vivo, elevated levels of TMP (399.38 ng/g tumor) were observed in HCT116 tumors harvested from mice treated with TMP for 17 days. The levels of TMP associated with HCT116 tumors were considerably higher than those observed in mouse plasma at day 3 (15.67 ng/ml plasma) and at day 17 (99.5 ng/ml plasma), indicating that the orally administered TMP was successfully delivered to and accumulated in HCT116 tumors implanted in mice.

### Example 75. Shedding Resistant IL15-IL15Ra Constructs

[1406] To maintain the efficiency of the trans-presentation of IL15 via the IL15-IL15Ra fusion molecule, the IL15-IL15Ra shedding needs to be prevented. For this purpose, new DD-IL15-IL15Ra and constitutive IL15-IL15Ra constructs are designed through a variety of modifications on the IL15-IL15Ra fusion molecule. For example, the IL15 molecule or the IL15Ra molecule is truncated or mutated to remove presumable cleavage sites. IL15Ra has a cleavage site (PQGHSDTT from the position 168 to 175 of SEQ ID NO. 2752) in the extracellular domain immediately distal to the transmembrane domain of the receptor, as described by Bergamaschi C et al. (2008). J Biol Chem 283(7):4189-99; Anthony S M et al. (2015). PLoS One. 10(3): e0120274), and International Patent Application Publication Nos. WO2014066527 and WO2009002562 (the contents of each of which are incorporated herein by reference in their entirety). Tumor necrosis factor-alpha-converting enzyme (TACE/ADAM17) has been implicated as a protease that cleaves between glycine (at the position 170 of SEQ ID NO. 2752) and histidine (at the position 171 of SEQ ID NO. 2752) and generates a naturally occurring soluble form of IL15Ra. The same mechanism can be responsible for the IL15-IL15Ra shedding. Hence, the cleavage site of IL15Ra is mutated such that cleavage by an endogenous protease is prevented. The mutation of the cleavage site is introduced by substitution, insertion or deletion of amino acid residues. The IL15-IL15Ra fusion molecule is also modified such that the full-length or truncated IL15-IL15Ra fusion molecule is fused to heterologous hinge domains and/or heterologous transmembrane domains. As non-limiting examples, variants of IL15Ra can be utilized. Additionally, the length and sequence of the linkers that connect IL15 and IL15Ra are modified.

[1407] To confirm that the modifications on the IL15-IL15Ra fusion molecule prevent shedding, the new DD-IL15-IL15Ra or constitutive IL15-IL15Ra constructs are introduced into HCT-116 cells. Surface expression of IL15 and IL15Ra on the HCT-116 cells is examined by flow cytometry using anti-IL15 and IL15Ra antibodies to assess surface IL15-IL15Ra shedding. The presence or absence of IL15 in the cell culture supernatant is also analyzed by MSD assay. As a functional assay based on the sensitivity of NK cell activation by shed IL15 in tumor supernatant, the transwell assay is conducted using HCT-116 cells transduced with new DD-IL15-IL15Ra or constitutive IL15-IL15Ra expressing constructs and NK cells. The new DD-IL15-IL15Ra-expressing constructs that do not induce activation of NK cells in the presence of ligand and the new constitutive IL15-IL15Ra-expressing constructs that do not induce activation of NK cells are chosen for use in future experiments.

### Example 76. Regulated Expression of IL15-IL15Ra Fusion Molecule with C-Terminal DD

[1408] A fusion molecule is generated by fusing membrane bound IL15, IL15 Receptor alpha subunit (IL15Ra) and a human DHFR (DD). These fusion molecules were cloned into pLVX-EF1α-IRES-Puro vector.

[1409] To test ligand dependent IL15-IL15Ra production, 1 million HEK-293T cells were plated in a 6-well plate in growth media containing DMEM and 10 FBS and incubated overnight at 37° C., 5% CO2. Cells were then transfected with 100 ng of constitutive IL15-IL15Ra (OT-IL15-008) or DD linked IL15-IL15Ra (OT-IL15-037 or OT-IL15-040) using Lipofectamine 2000 and incubated for 24 hrs. Following the incubation, media is exchanged for growth medium with or without 50 μM Trimethoprim (TMP) and further incubated for 48 hrs. Cells were harvested and IL15 levels are analyzed via western blotting using human IL15 antibody (Abcam, Cambridge, UK). The molecular weight of IL15Ra in OT-IL15-037 and OT-IL15-040 appeared to be the same as OT-IL15-008.

[1410] To test if IL15 is shed into the media, supernatant from HEK293 cells expressing IL15-IL15Ra fusion constructs was subject to immunoassays such as MSD (Rockville, Maryland). 48 hours after transfection, cells were analyzed and, as expected, constitutive IL15-IL15Ra construct OT-IL15-008 showed high surface expression of IL15 in the presence and absence of ligand. OT-IL15-037 and OT-IL15-040 showed the ligand (Trimethoprim) dependent surface expression of IL15 and IL15Ra (FIG. 50). The detection of membrane bound IL15-IL15Ra fusion constructs in the supernatant suggests that IL15 constructs are likely shed from the cell surface.

### Example 77. Effect TMP Exposure to TMP In Vitro on Membrane Bound IL15 Expression

[1411] In order to determine if the dose and time of exposure to TMP in vitro influenced membrane bound IL15 expression, an in vitro dose response study was conducted with T cells expressing OT-IL15-073. For this purpose, T cells were activated with CD3/CD28 beads at 3:1 bead to T cell ratio in 24-well plates for 24 hrs. Lentivirus was added to wells. After 24 hrs, fresh media was added every 2-3 days to expand cells while maintaining cells at 0.5-1×10⁶/ml. On day 11 of expansion. T cells treated with TMP starting at 100 uM, 10× dilutions and 9 points were analyzed after 2 hours in culture (washed 3× after TMP addition, fresh media added without TMP for 22 hours), 6 hours in culture, or 24 hours in culture and the results are shown in FIG. 51A. As shown in FIG. 51B and Table 89, this study showed that TMP ligand regulates membrane bound IL15 expression and the dose and time of exposure to TMP in vitro influences membrane bound IL15 expression.

TABLE 89
Membrane Bound IL15 Expression

| | EC50, uM | EC90, uM | EC50, | EC90, |
|---|---|---|---|---|
| TMP | (% IL15+ | (% IL15+ | uM (total | uM (total |
| Treatment | IL15Ra+) | IL15Ra+) | IL15 MFI) | IL15 MFI) |
| 24 hour | 0.035 | 0.255 | 0.063 | 0.75 |
| 24 hour (wash | 11.5 | 59.6 | 11.1 | 66.9 |
| at 2 hours) | | | | |
| 6 hours | 0.021 | 0.81 | 0.030 | 0.88 |

### Example 78. Regulated Membrane Bound IL15 Expression In Vivo

[1412] To evaluate regulation of membrane bound IL15 in vivo, 2 constructs were selected for evaluation in vivo. Four group of T cells were used for this study and are outlined in Table 90. In Table 90, “N” represents the number of mice in each group.

TABLE 90
T Cell Groups

| Group | N | T Cells | Treatment |
|---|---|---|---|
| 1 | 4 | Untransduced | — |
| 2 | 4 | OT-IL15-071 (pELNS vector, EF1a promoter, | — |
| | | membrane bound IL15 sequence from | |
| | | OT-IL15-008) | |
| 3 | 4 | OT-IL15-073 (pELNS vector, EF1a promoter, | Vehicle |
| | | membrane bound IL15 sequence from | |
| | | OT-IL15-009) | |
| 4 | 4 | OT-IL15-073 (pELNS vector, EF1a promoter, | TMP |
| | | membrane bound IL15 sequence from | |
| | | OT-IL15-009) | |

[1413] The T cells which were to be used as part of the in vivo study were evaluated 6 days post transduction, day of implant (day 9 post transduction) and 13 days post transduction and the cells in Groups 2-4 showed expression of the constructs.

[1414] T cells outlined in Table 90 were administered to mice by intravenous administration (3.9×10⁶ cells per mouse implanted). On day 3 the mice were dosed with 500 mg/kg of TMP 3 times (4 hours between doses) and bled 2 hours after each dose. The mice were again bled on day 4, 24 hours after the first TMP dose.

[1415] FIG. 52A-FIG. 52C show the expression of membrane bound IL15, 2, 6, 10, and 24 hours after the first TMP dose, using IL15 staining (FIG. 52A), IL15Ra staining (FIG. 52B), and IL15/IL15Ra double++staining (FIG. 52C). FIG. 52D are FACS plots for each mouse 10 hours after the first TMP dose. FIG. 52E shows the expression of membrane bound IL15 in blood 2, 6, 10, and 24 hours after the first TMP dose and FIG. 52F shows the plasma TMP levels 2, 6, 10, and 24 hours after the first TMP dose.

### Example 79. Effect of Long Term Intraperitoneal (IP) or Oral (PO) TMP Dosing on T Cell Function

[1416] In this study, T cells transduced with OT-IL15-071 or OT-IL15-073 (no lentiBoost) were administered intravenously to mice (15×10⁶ per mouse). 6 study groups were evaluated for this study: (1) untransduced, (2) OT-IL15-071 T cells, (3) OT-IL15-073 PO vehicle, (4) OT-IL15-073 PO TMP 500 mg/kg), (5) OT-IL15-073 IP vehicle, and (6) OT-IL15-073 IP TMP 300 mg/kg. The study design is shown in Table 91. PO dosing is 500 mg/kg TMP in 0.1M citrate and IP dosing is 300 mg/kg TMP lactate in water.

TABLE 91
Study Design

| | | | Sample |
|---|---|---|---|
| Timepoint | | Dose | Collection |
| Day | −3 | Inject T cells in mice by IV administration | — |
| Day | 0 | PO 1x or IP 1x | — |
| 4 | hours | PO 1x | — |
| 6 | hours | — | Bleed (survival) |
| 24 | hours | PO 2x or IP 1x | Bleed (survival) |
| Day | 2 | PO 1x or IP 1x | — |
| Day | 3 | PO 1x or IP 1x | — |
| Day | 4 | PO 2x or IP 1x | — |
| 120 | hours | PO 2x or IP 1x | Bleed (survival) |
| 126 | hours | — | Bleed (survival) |
| Day | 6 | PO 2x or IP 1x | — |
| Day | 7 | PO 2x or IP 1x | — |
| Day | 8 | — | Bleed (survival) |
| Day | 19 | — | Bleed (survival) |
| Day | 25 | — | Bleed (terminal) |

[1417] The regulated expression in blood was analyzed 6 hours and 24 hours after the first dose, and 6 hours after the 5^{th} dose.

[1418] OT-IL15-071 showed expression of membrane bound IL15 and the untransduced control did not show any expression.

[1419] Regulation of membrane bound IL15 was seen with repeat PO and IP dosing. As seen in FIG. 53, regulated expression of membrane bound IL15 was detected 6 hours after the first dose on day 0, and 6 hours after dosing on day 5 (126 hrs) with both PO and IP dosing. There was no increase in expression in mice treated with vehicle.

### Example 80. IL15 Shedding

[1420] To test if IL15 is shed into the media, supernatant from HCT116 cells expressing IL15-IL15Ra fusion constructs was subject to immunoassays such as ELISA and MSD (Rockville, Maryland). In FIG. 54B, OD indicates optical density. IL15 was measured in the media of cells expressing IL15-IL15Ra fusion constructs. OT-IL15-009 construct demonstrated a TMP dose dependent increase in IL15 levels detected in the media. The level of IL15 in the media detected with the constitutive construct OT-IL15-008 was much higher than the levels detected with the DD regulated constructs (FIG. 54B). As shown in FIG. 54C, a dose dependent increase in IL15 levels was observed with both the DD regulated constructs using the MSD immunoassay. The detection of membrane bound IL15-IL15Ra fusion constructs in the supernatant suggests that IL15 constructs are likely shed from the cell surface.

### Example 81. IL15-IL15Ra In Vivo Tumor Study

[1421] The functional capability of IL15-IL15Ra constructs was tested in vivo in xenograft assays. The experiment was designed to test the hypothesis that pulsatile expression of IL15-IL15Ra fusion proteins from cancer cell lines such as HCT116, in mice may stimulate the mouse's NK cells to attack the tumor leading to tumor growth inhibition. 5 million HCT116 cells expressing constitutive IL15-IL15Ra construct (OT-IL15-008) or DD regulated construct (OT-IL15-009) were implanted subcutaneously into nude mice with 50% matrigel. Tumors were allowed to develop over a period of 22 days. On day 8, mice expressing OT-IL15-009 constructs were separated from the rest of the animals and split into three groups. Group1 received vehicle control for 7 days, while group2 received 100 mg/kg of Trimethoprim, while the third group did not receive any drug treatment. As shown in FIG. 55A, mice injected with parental HCT116 cells (G1) were able to form tumors. Mice injected with OT-IL15-008 expressing cells (G2) formed very small tumors in comparison. Injecting both the parental (G5R) and the constitutive construct (G5L) in opposite flanks of the same mouse did not affect the tumor growth capacity of either cohort.

[1422] Mice injected with OT-IL15-009 expressing cells were left untreated, or treated with vehicle control or TMP. As shown in FIG. 55B, mice treated with TMP had smaller tumors than mice of the other two groups, suggesting that pulsatile expression of IL15-IL15Ra construct may contribute to anti-tumor activity.

### Example 82. EBV Tumor Antigen Mediated TCR Re-Stimulation In Vivo

[1423] Human T cells engineered to express DD regulated cytokines are not antigen specific which limits their functional analysis in mice. However, functionality of T cells in vivo requires their restimulation which occurs upon engagement with the antigen. This requirement for antigen mediated restimulation can be mimicked experimentally in mice using the Epstein Barr Virus (EBV) antigen. Approximately 90% adults have a current or a previous EBV infection. Additionally, the major histocompatibility group HLA-A02 has been associated with the decreased risk of developing EBV positive Hodgkin's lymphoma, suggesting that the CTL peptide epitopes that promote EBV clearance are presented by HLA-A02. Tumor cell lines that are HLA-A02 positive e.g. Raji cells are used for in vivo studies. Primary human T cells obtained from various donors are expanded with CD3/CD28 dynabeads. To test reactivity of T cells to the EBV antigen, EBV positive Raji cells and EBV negative Ramos cells are used. The involvement of HLA-A02 in antigen recognition is tested using anti-HLA antibodies with both cell. Cell killing assays are performed by incubating T cells with fluorescently labelled Raji cells or Ramos cells and the ability of the donor T cells to preferentially kill Raji cells is evaluated. The activation of T cells in response to interaction with EBV antigen is measured by culturing mitomycin treated Raji or Ramos cells with fluorescently labelled T cells expressing IL12 or with exogenously supplemented IL12. The activation and proliferation status of T cells is examined by measuring expression of IL2, IFNg, CD107a, Granzyme, Perforin. Since most humans have been exposed to EBV, the donor T cells in most instances are expected to be immunoreactive to Raji cells but not to Ramos cells. It is likely that T cells reactive to Raji cells will be positive for markers of T cell activation such as IL2, Granzyme and Perforin.

### Example 83. EBV Tumor Antigen Mediated TCR Re-Stimulation In Vivo

[1424] Human T cells engineered to express DD regulated cytokines are not antigen specific. However, functionality of T cells in vivo requires their restimulation which occurs upon engagement with the antigen. This requirement for antigen mediated restimulation can be mimicked in vivo in mice, the Epstein Barr Virus (EBV) antigen may be utilized. Approximately 90% adults have a current or a previous EBV infection. Additionally, the major histocompatibility group HLA-A02 has been associated with the decreased risk of developing EBV positive Hodgkin's lymphoma, suggesting that the CTL peptide epitopes that promote viral clearance are presented by HLA-A02. Several tumor cell lines that are HLA-A02 positive, e.g. Raji cells, are used for in vivo studies. Primary human T cells obtained from various donors are expanded with CD3/CD28 dynabeads. To test reactivity of T cells the EBV antigen, EBV positive Raji cells and EBV negative Ramos cells are used. The involvement of HLA-A02 in antigen recognition is tested using anti-HLA antibodies to test assay specificity. Cell killing assays are performed by incubating T cells with fluorescently labelled Raji cells or Ramos cells and the ability of the donor T cells to preferentially kill Raji cells is evaluated. The activation of T cells in response to interaction with EBV antigen is measured by culturing mitomycin treated Raji or Ramos cells with fluorescently labelled T cells. The activation and proliferation status of T cells is examined by measuring expression of IFNg, CD107a, Granzyme, and Perforin. Since most humans have been exposed to EBV, the donor T cells in most instances are expected to be immunoreactive to Raji cells, but not Ramos cells. It is likely that T cells reactive to Raji cells will be positive for markers of T cell activation such as Granzyme and Perforin.

### Example 84. Kinetics of Ligand-Dependent Stabilization of DD-IL15-IL15Ra

[1425] To test DD regulated constructs in T cells, OT-IL15-009 construct was transduced into human donor T cells. As additional controls, cells were transduced with constitutive construct OT-IL15-008 or left untransduced. Cells were then treated with 100 μM TMP and IL15Ra expression was measured by FACS using anti-IL15Ra antibodies and measured against forward scatter. The percentage of IL15Ra positive cells increased from 1.68% in the untreated cells to 16.6% in the TMP treated cells, indicating ligand dependent regulation. Expression of IL15Ra was also compared to untransduced cells in the presence or absence of TMP as well as in control cells constitutively expressing IL15-IL15Ra. In this experiment, it was observed that the percentage of IL15Ra positive cells increased from 1% to 16% in the T cells expressing OT-IL15-009 construct when treated with TMP. This expression level was comparable to cells transduced with the constitutive construct. Untransduced T cells did not show ‘expression of IL15Ra both in the presence and absence of ligand.

[1426] The on/off kinetics of ligand-dependent stabilization of DD-IL15-IL15Ra was measured in CD4 positive T cells. T cells were transduced with the ecDHFR DD-IL15-IL15Ra fusion construct (OT-IL15-009) and treated with 100 μM ecDHFR ligand Trimethoprim (TMP) or vehicle control, DMSO. At multiple time points (i.e., 1, 2, 4, 6, 8, 15, 22 and 24 hrs) after TMP treatment, the transduced T cells were collected and analyzed for IL15Ra surface expression using anti-IL15Ra antibodies by flow cytometry. Untransduced T cells were used as a negative control. The T cells were sorted into CD4 positive and CD8 positive populations and the percentage of IL15Ra positive CD4 positive T cells was analyzed. Table 92 shows the kinetics of surface expression of IL15Ra on CD4 T cells after TMP treatment. The stabilization ratio was calculated as the fold change in IL15Ra expression in ligand treated samples compared to treatment with DMSO (i.e. in the absence of ligand) with the same construct. The destabilization ratio was calculated as the fold change in IL15Ra levels in the DD regulated constructs compared to the constitutive construct (OT-IL15-008) in the absence of the ligand. Destabilization ratios less than 1 and stabilization ratios greater than 1 are desired in DDs.

TABLE 92
TMP dose response

| | Un- | | | | Stab- | De- |
|---|---|---|---|---|---|---|
| TMP | trans- | OT-IL | OT-IL15-009 | | ilization | stabilization |
| (hours) | duced | 15-008 | DMSO | TMP | Ratio | ratio |
| 1 | 1.26 | 27.96 | 2.03 | 1.86 | 0.92 | 0.07 |
| 2 | 1.25 | 28.10 | 2.12 | 2.27 | 1.07 | 0.08 |
| 4 | 1.14 | 27.76 | 1.99 | 4.01 | 2.02 | 0.07 |
| 6 | 1.18 | 28.14 | 1.87 | 5.85 | 3.13 | 0.07 |
| 8 | 1.05 | 28.21 | 2.14 | 7.09 | 3.31 | 0.08 |
| 15 | 1.37 | 29.15 | 2.46 | 12.53 | 5.09 | 0.08 |
| 22 | 1.20 | 29.15 | 2.78 | 14.57 | 5.24 | 0.10 |
| 24 | 1.35 | 29.70 | 2.07 | 13.75 | 6.64 | 0.07 |

[1427] Among the CD4 positive T cells transduced with the OT-IL15-009 construct, the proportion of cells with surface expression of IL15Ra remained similar for both TMP treated and DMSO treated cells until 2 hrs after TMP treatment, and was comparable to that of untransduced cells. However, 4 hrs after TMP treatment, the cells transduced with the OT-IL15-009 construct and treated with TMP exhibited an increased proportion of cells with surface expression of IL15Ra. This trend was observed until 22 hours after treatment with TMP. The CD4 positive T cells with surface-expressed IL15Ra cells constituted ˜1% of untransduced cells, indicating that the proportion of cells that expressed endogenous IL15Ra is low. In summary, the stabilization ratio showed a time dependent increase while the destabilization ratio remained at or below 0.1 reflecting low basal expression, reflecting the tunability of the DD regulated IL15 construct.

### Example 85. IL12 Expression In Vivo

[1428] SKOV3 tumor cells expressing FKBP regulated-IL12 (#OT-IL12-009) or parental cells were implanted into SCID Beige mice (Day 0). Mice implanted with FKBP IL12 were dosed intraperitoneally with Shield-1 (10 mg/kg or 30 mg/kg) or vehicle control on Day 43. Blood samples were collected prior to dosing (0 hour) as well as at 2, 6, and 24 hours after Shield-I dosing and serum human IL12 levels were measured using ELISA. The serum IL12 concentrations are presented in FIG. 56. IL12 levels increased in Shield-1 treated mice at 2 and 4 hours after treatment, compared with those at 0 hours. By 24 hours following treatment, the IL12 levels returned levels observed at 0 hours. The increase in IL12 at 2 and 4 hours after treatment was observed with both doses of Shield-1. IL12 levels in vehicle control treated mice was generally lower than those in the Shield-1 treated mice.

### Example 86. Promoter Selection for Expression of IL12 Constructs

[1429] The expression of SREs in a vector can be driven by either the retroviral long terminal repeat (LTR) or by cellular or viral promoters located upstream of the SRE. The activity of the promoter may vary with the cell type and thus promoter selection must be optimized for each cell type. To identify optimal promoters, IL12 fused to FKBP DD and an optional furin cleavage site was cloned into pLVX. IRES Puro vector and placed under the transcriptional control of a CMV promoter (OT-IL12-005, OT-IL12-009), a PGK promoter (OT-IL12-025, OT-IL028), an EF1a promoter (OT-IL12-020, OT-IL12-026, OT-IL12-029), or without a promoter (OT-IL12-027, OT-IL12-030). Constructs were transiently transfected into HEK293T cells and cells were treated with Shield-1 for 24 hours. IL12 levels in the supernatant were measured using p40 ELISA and MSD immunoassay. As shown in FIG. 57A and FIG. 57B, among the IL12 constructs, expression of IL12 in the absence of Shield-1 was very low to undetectable when the PGK, EF1a or no promoter was utilized. In contrast, IL12 expression under the CMV promoter was detectable even in the absence of Shield-1 suggesting that the CMV promoter is leaky. IL12 levels were increased with shield-1 treatment with all constructs. The PGK promoter showed the smallest induction of IL12 with ligand treatment compared to other promoters.

[1430] IL12 constructs were also tested in HCT 116 cells and Raji cells over a range of shield-1doses. IL12 constructs driven by the EF1a promoter were transfected into HCT116 cells. Cells were incubated for 24 hours and then treated with Shield-1 for another 24 hours. Secreted IL12 levels were then measured. As shown in FIG. 57C, IL12 expression in HCT cells expressing OT-IL12-026 (EF1a) construct increased with increasing doses of Shield-1 while the expression of IL12 was undetectable with vehicle control. OT-IL12-029 showed similar increase in IL12 expression with Shield-1 expression, however, the levels of IL12 obtained with vehicle control treatment were comparable to shield-1 treated cells. As expected the constitutive construct showed high levels of IL12 both in the presence and absence of Shield-1, while the parental HCT116 cells did not secrete any IL12. Intracellular IL12 levels in HCT116 cells were compared with secreted IL12 levels. Cells were dosed with 1 μM Shield-1 for 24 hours and IL12 were measured in the supernatant and within cells using MSD immunoassay. As shown in FIG. 57D, secreted IL12 levels with the OT-IL12-026 and 029 construct was increased with Shield-1 treatment as compared to the vehicle control. However, intracellular concentration of IL12 did not increase with both constructs in Shield-1 treated cells. The intracellular concentrations of IL12 were also 10-fold lower than secreted IL12 levels. These data suggest that Shield-1 may be increasing the secretion of IL12 into the media.

[1431] A Shield-1 dose responsive increase in secreted IL12 levels was observed with the expression of OT-IL12-025 (PGK) in Raji cells (FIG. 57E). Taken together, these results indicate that transcriptional control of IL12 by EF1a, or no promoter results in low basal expression in the absence of ligand and strong ligand dependent expression. In contrast, the CMV promoter results in high basal expression while only low levels of IL12 are detected with PGK promoter.

### Example 87. IL12 Expression In Vivo: HCT116 Tumor Study

[1432] The HCT116 tumor study is established to correlate tumor size with serum IL12 levels before and after dosing with ligands such as Aqua Shield. DD regulated or constitutive constructs are transduced into HCT116 cells and the cells are injected subcutaneously at 10 million per injection into the flanks of CD-1 nude mice, and SCID beige mice. Mice are allowed to develop tumors that are approximately 200-300 mm³ in size and then dosed with ligands. For example, Shield-1 is dosed orally at 50 mg/kg or vehicle control. The frequency of dosing is varied to identify the optimal dosage and frequency of dosage. Blood samples are collected prior to shield-1 dosing as well as 2, 4, 6 and 24 hours after dosing. Plasma IL12 levels are measured and correlated with tumor volume. When the tumors reach approximately 1000 mm³, mice are sacked and plasma, tumor and kidney samples are collected. Tumor growth is expected to correlate with plasma IL12 levels such that larger tumors secrete more IL12.

### Example 88. Ligand Regulated Expression of IL12 in T Cells

[1433] T cells from human donors were thawed on day zero and stimulated with αCD3/αCD28 beads. On day one, cells were transduced with either DD regulated IL12 constructs, OT-IL12-026 and OT-IL12-029; or were left untransduced. The puro titer of the OT-IL12-026 and OT-IL12-029 were 6e⁷ TU/mL and 5e⁷ TU/mL respectively. Cells were allowed to recover and then treated with Shield-1 for 48 hours. IL12 levels were measured in the supernatant using an immunoassay, MSD assay. The results are shown in Table 93.

TABLE 93
IL12 levels in T cells

| Treatment | Control | OT-IL12-026 | OT-IL12-029 |
|---|---|---|---|
| Vehicle | 0 | 17 | 24 |
| Shield-1 1 μM | 1 | 854 | 530 |

[1434] As shown in Table 93, IL12 levels were increased 50-fold in OT-IL12-026, the construct without a cleavable linker and increased 22-fold in OT-IL12-029, the construct with the cleavable furin linker. As expected, no IL12 expression was seen in the untransduced parental T cells. Taken together, these data demonstrate that IL12 secretion can be induced in T cells transduced with DD regulated IL12 and can be regulated by the addition of ligand.

### Example 89. Kinetic and Concentration-Dependent Regulation of IL12 in Human T Cells

[1435] On day 0, the human donor T cells were thawed and cultured in the presence of IL2 and CD3/CD28 beads. On day 1, cells were transduced with lentivirus for construct OT-IL12-026 at MOIs of 40, 13.3 or 4.4. 24 hours following the transduction, the media was replaced with fresh media containing CD3/CD28 beads and IL2. On day 13, the cells were debeaded by centrifuging cells and resuspending the cell pellet in media with IL2. Cells were then plated at 100,000 per well on U-bottom 96-well plate. On day 14, cells were treated for 24 hours with varying concentrations of Shield-1 or vehicle control. On day 15, the supernatant was harvested and IL12 p40 levels were measured by MSD assay. The results are shown in Table 94. In the Table 94, MOI stands for multiplicity of infection.

TABLE 94
IL12 levels in T cells

| Shield-1 (nM) | MOI = 4.4 | MOI = 13.3 | MOI = 40 |
|---|---|---|---|
| 0.1 | 49.44 | 48.10 | 88.30 |
| 1 | 50.44 | 48.61 | 80.07 |
| 5 | 50.44 | 49.54 | 88.83 |
| 10 | 178.18 | 220.08 | 374.90 |
| 50 | 357.11 | 420.72 | 608.85 |
| 100 | 710.56 | 972.56 | 1293.01 |
| 500 | 1284.95 | 1307.70 | 1861.36 |
| 1000 | 1152.28 | 1559.43 | 2346.15 |
| 2000 | 1071.54 | 1577.99 | 2330.88 |

[1436] As shown in Table 94, all three MOIs showed a Shield-1 dose dependent increase in IL12 levels. Additionally, IL12 levels secreted by T cells was also proportionate to the MOI, with the higher MOI showing the highest IL12 levels for any given concentration of Shield-1 treatment. The dose response curve was similarly shaped for all three doses was similar, but the absolute values were different for each dose. At higher concentrations of Shield-1, i.e. greater than 5 μM, viability was reduced as cells started to die likely due to the high concentration of vehicle. The EC₅₀ which is the half effective dose of Shield-1 for each MOI is show in Table 95.

TABLE 95
Shield-1 EC₅₀ in T cells

| MOI | EC50 (nM) |
|---|---|
| 40 | 130 |
| 13.3 | 94 |
| 4.4 | 84 |

[1437] A time course experiment was also performed using Shield-1 at a dose of 1 μM. T cells transduced with OT-IL12-020, OT-IL12-026 or empty vector were treated with Shield-1 or vehicle control for 4, 8, 16 and 24 hours. IL12 p40 levels were measured using MSD assay. The results are shown in Table 96. The stabilization ratio was measured as the ratio of expression of IL12 in the presence of the stimulus to the expression in the absence of the stimulus.

TABLE 96
Time course of IL12 expression

| Time | | | OT-IL12-026 | | |
|---|---|---|---|---|---|
| (Hours) | Vector | OT-IL12-020 | Vehicle | Shield-1 | Stabilization ratio |
| 4 | 0.20 | 2171.42 | 120.00 | 311.28 | — |
| 8 | 0.11 | 2090.96 | 81.82 | 499.45 | 6.10 |
| 16 | 0.27 | 1657.67 | 28.80 | 1070.71 | 37.17 |
| 24 | 0.23 | 2198.52 | 100.11 | 1447.78 | 14.46 |

[1438] As shown in Table 96, OT-IL12-026 construct showed an increase in IL12 levels over the course of time, when compared to cells treated with vehicle control. At 4 hours after treatment, the stabilization ratio IL12 levels were increased 2.7-fold compared to vehicle, at 8 hours IL12 levels increased by 6-fold; at 16 hours, the levels increased by 35-fold, and by 24 hours the IL12 levels increased to 14-fold compared to vehicle control. The constitutive construct OT-IL12-020, showed consistently high expression of IL12. A decrease in the expression of the constitutive construct was observed at 16 hours. However, the levels of IL12 were still much higher than OT-IL12-026, both in the presence or absence of Shield-1. As expected the vehicle control showed little to no expression of IL12. Taken together, these data demonstrate the kinetic regulation of DD-IL12 secretion in T cells with fine-tuned control compared to the elevated levels of constitutive IL12 secretion.

[1439] In another study, it was shown that CD8 cells expand more than CD4 cells, and that T cells (especially the CD8+ subset) lose IL12 expression during expansion. Restimulation of the cells with CD3/CD28 beads at day 14 increased the frequency and expression level of IL12 as compared to cells at day 14 that had not been restimulated.

[1440] To further evaluate restimulation, OT-IL12-020, OT-IL12-026, vehicle only and empty vectors were tested in T cells at day 0, 7 and 14 post transduction. The CD8+ subset increased over time in vitro, the frequency of IL12p70+ T cells decreased over time in culture but IL12 can be reinduced with CD3/CD28 and were shown to increase with restimulation on day 14. Shield-1 was found to increase production of IL12, but not IFNγ, by T cells in vitro on Day 15 post transduction. In this study, basal levels of DD-IL12 were sufficient (remained above the EC50 for Th1 differentiations) to skew non-transduced cells towards a Th1 phenotype during in vitro T cell expansion.

### Example 90. In Vivo Regulation of DD-IL12 in T Cells

[1441] T cells were activated, transduced with OT-IL12-020, OT-IL12-026 or empty vector and expanded over a period of 10 days as discussed in Example 28. On day 0 of the assay, T cells were injected in vivo into NSG mice, following which Aquashield was injected into mice. On day 3, Aquashield was injected at a dose of 100 mg/kg. Prior to the Aquashield injection, a blood sample was collected from the mice and served as the 0-hour time point or as the untreated control. A repeat dose of 100 mg/kg was administered at 4 hours following the first dose. Blood samples were collected from mice at 4, 8, 12 and 24 hours following the initial dose. Plasma IL12 levels were measured using MSD assay and the results are shown in Table 97.

TABLE 97
IL12 levels in T cells in vivo

| Construct | Time (hours) | Vehicle | Aquashield |
|---|---|---|---|
| Empty Vector | 0 | 1.00 | — |
| Empty Vector | 24 | 1.00 | — |
| OT-IL12-020 | 0 | 298221.91 | — |
| OT-IL12-020 | 24 | 268743.49 | — |
| OT-IL12-026 | 0 | 1070.18 | 885.41 |
| OT-IL12-026 | 4 | 1108.22 | 20141.45 |
| OT-IL12-026 | 8 | 1195.68 | 32287.39 |
| OT-IL12-026 | 12 | 1026.01 | 30137.85 |
| OT-IL12-026 | 24 | 1032.65 | 7903.30 |

[1442] As shown in Table 97, plasma IL12 levels for OT-IL12-026 were much higher at 4 hours following first dose and peaked at 8 hours, following which, they decreased at 12 hours and decreased even further at 24 hours. Virtually no IL12 was detected in the plasma of vehicle control treated mice suggesting low basal expression of the construct. These observations were also reflected in the destabilization ratio of OT-IL12-026, which was 0.0035, indicating strong destabilization in the absence of ligand and stabilization ratios of 18.17, 27, 29.37 and 7.65 respectively for 4, 8, 12 and 24 hours of Shield-1 treatment of OT-IL12-026 expressing cells. The stabilization ratio was measured as the ratio of expression of IL12 in the presence of the stimulus to the expression in the absence of the stimulus. The destabilization ratio was measured as the ratio of expression of IL12 in the absence of the shield-1 to the expression of IL12 that is expressed constitutively. As expected, plasma of mice injected with T cells expressing the constitutive construct showed high IL12 expression both at 0 and 24 hours, while no IL12 was detected in the plasma of mice injected with T cells expressing empty vector.

[1443] IL12 levels in response to varying doses of Aquashield was also tested in vivo. 3 days after injecting 25 million T cells transduced with OT-IL12-026, NSG mice (n=4) were dosed orally with Aquashield at 50 or 100 mg/kg at 0 and 48 hours. Blood samples were collected at 0, 4, 8 and 24 hours after the first dosing. The mice were allowed to rest for 24 hours, following which, they were dosed with Aquashield again (i.e. at 48 hours since the initial dose) and blood samples were collected at time points identical to the first dose. Plasma IL12 levels were measured using p70 MSD assay. The results are shown in Table 98. The stabilization ratio was measured as the ratio of expression of IL12 in the presence of the stimulus to the expression in the absence of the stimulus. The destabilization ratio was measured as the ratio of expression of IL12 in the absence of the shield-1 to the expression of IL12 that is expressed constitutively.

TABLE 98
Shield-1 dose response

| | | 50 mg/kg Aquashield | | 100 mg/kg Aquashield | |
|---|---|---|---|---|---|
| Time | | IL12 | Stabilization | IL12 | Stabilization |
| (hours) | Vehicle | (pg/ml) | ratio | (pg/ml) | ratio |
| 0 | 3.97 | 4.27 | — | 4.74 | — |
| 4 | 1.66 | 85.83 | 51.73 | 130.53 | 78.68 |
| 8 | 1.40 | 54.96 | 33.12 | 157.88 | 95.16 |
| 24 | 1.39 | 4.45 | 2.68 | 9.98 | 6.01 |
| 48 | 1.72 | 2.93 | 1.76 | 3.50 | 2.11 |
| 52 | 1.82 | 60.27 | 36.32 | 91.37 | 55.07 |
| 56 | 0.95 | 43.71 | 26.35 | 106.09 | 63.94 |
| 72 | 1.01 | 3.84 | 2.32 | 6.53 | 3.93 |

[1444] Similar to the single dosing experiments, described in table 98, mice treated with 100 mg/kg showed peak plasma IL12 in Aquashield treated mice at 8 hours and declined by 24 hours, reaching levels comparable to the IL12 levels at 0 hours, and remained low at 48 hours. 4 hours after the second dose, IL12 levels began to increase, reaching a peak level at 8 hours following the second dose and reached baseline levels by 24 hours after the second dose e.g., 72 hours after the initial dose. Mice treated with the 50 mg/kg Aquashield showed peak plasma IL12 at 4 hours after dosage, which continued to decline at subsequent time points tested. These trends were also reflected in the stabilization ratios calculated for each of the time points with both doses. With higher dose of Shield-1, higher stabilization ratios were observed at each time point suggesting the dose responsive elevation in IL12 levels. The destabilization ratios were also measured at both doses of Shield-1 by injecting a small cohort of mice with T cells expressing the constitutive construct, OT-IL12-020. At time point zero, the stabilization ratio for 50 and 100 mpk was 0.004 for both doses, suggesting low basal expression in the absence of ligand. These data also suggest that it is possible to restimulated the T cells transplanted into mice to produce IL12. Additionally, IFNγ was produced in the basal state and it was upregulated concurrent with IL12.

[1445] An additional cohort dosed at 10 mg/kg was also included to fully define the dose response curve. These results are shown in Table 99.

TABLE 99
IL12 response to second dose of Shield-1

| | | 10 mg/kg Aquashield | | 50 mg/kg Aquashield | | 100 mg/kg Aquashield | |
|---|---|---|---|---|---|---|---|
| Time | | IL12 | Stabilization | IL12 | Stabilization | IL12 | Stabilization |
| (hours) | Vehicle | (pg/ml) | ratio | (pg/ml) | ratio | (pg/ml) | ratio |
| 0 | 1.72 | 2.79 | — | 2.93 | — | 3.50 | — |
| 4 | 1.82 | 8.13 | 4.48 | 60.27 | 33.20 | 91.37 | 50.34 |
| 8 | 0.95 | 4.35 | 2.40 | 43.71 | 24.08 | 106.09 | 58.45 |
| 24 | 1.01 | 1.52 | 0.84 | 3.84 | 2.12 | 6.53 | 3.60 |

[1446] Compared to the 50 and 100 mg/kg doses, the 10 mg/kg dose showed very little IL12 expression that was comparable to the expression observed with the vehicle control treatment. A small increase in IL12 levels was observed at 4 hours with the 10 mg/kg dose, but the stabilization ratio observed at this time point was much lower than observed with the 50 and 100 mpk doses. Taken together, these data demonstrate that in vivo repeat dosing of the ligand, Aquashield results in a dose dependent increase in IL12 levels. The lack of IL12 in the plasma at 24 hours after dosing indicates that IL12 is cleared from the plasma by this time point resulting in distinct peaks of circulating IL12.

### Example 91. DD Regulated Recombinant IL2 Expression

[1447] FKBP (L106P) and ecDHFR (R12Y, Y100I) are well-characterized destabilizing domains which can confer instability to fusion partners (e.g., a POI). The instability is reversed by a synthetic ligand named Shield-1 that binds to FKBP DDs and TMP or MTX that binds to DHFR DD. An IL2 polypeptide was linked to either FKBP (F36V; L106P) or ecDHFR (R12Y, Y100I). IL2 constructs were packaged into pLVX-IRES-Puro lentiviral vectors. An IL2 signal sequence was inserted at the N terminus of the construct and linkers were placed between the signal sequence, the DD and IL2.

[1448] OT-IL2-001 (FKBP) was transduced into human colorectal carcinoma line, HCT-116. To measure the dependence of IL2 levels on Shield-1 dose, cells were plated onto a 96 well plate and treated with varying concentrations of Shield-1. Media was then collected from cells and IL2 levels were quantified using IL2 ELISA (FIG. 58). IL2 increased with increase in Shield-1 concentration and plateaued at higher Shield-1 dose levels. The half maximal effective concentration or EC₅₀ of Shield-1 was determined to be 50 nM.

### Example 92. DD Regulated Luciferase

[1449] A luciferase polypeptide was linked to either FKBP (F36V, L106P or F36V, E31G, R71G, K105E) or ecDHFR (R12Y, Y100I) and cloned into pLVX.IRES. Puro vector.

[1450] DD regulated luciferase can be used to track cells in vivo e.g. T cells. Firefly luciferase or Renilla luciferase may be utilized as the payload. HCT-116 cells were stably transduced with the constitutive (OT-RLuc-001) or DD regulated constructs (OT-RLuc-002, OT-RLuc-003, OT-RLuc-004, OT-RLuc-005 and OT-RLuc-006). Cells were treated with 1 μM Shield-1, 10 μM Trimethoprim or vehicle control for 24 hours and luciferase expression was measured via western blotting using anti-Renilla luciferase and anti-Firefly luciferase antibodies (Abcam, Cambridge, UK). Blots were also probed with anti-GAPDH antibody to ensure uniform protein loading in all samples. As shown in FIG. 59A, OT-RLuc-003 showed strong Shield-1 dependent stabilization of Renilla luciferase. OT-RLuc-004, 005 and 006 showed modest stabilization of Renilla luciferase in the presence of their corresponding ligand, while OT-FLuc-002 showed modest stabilization of firefly luciferase with the addition of Shield-1. As expected, the constitutive luciferase construct (OT-RLuc-001) showed expression of Renilla luciferase both in the presence and absence of ligand. (FIG. 59A).

[1451] Ligand dependent activity of Renilla and firefly luciferase constructs was measured using coelentrazine and luciferin substrates respectively. Cells were treated with 1 μM Shield-1, 10 μM Trimethoprim, or vehicle control for 24 hours, lysed with assay lysis buffer and incubated with the luciferase substrate. Luciferase activity was measured as luminescence reading using a luminometer and the values were compared to control samples consisting of lysis buffer and substrate. All DD regulated showed ligand dependent increase in luciferase activity compared to control. As expected, the constitutive construct OT-RLuc-001 showed high luciferase activity both in the presence and absence of ligand (FIG. 59B).

### Example 93. DD Regulated IL2 and IL2 Mediated Functions

[1452] DD-IL2 function is characterized in vivo by evaluating the ability of tumor cells expressing these constructs to establish tumors and proliferate under the treatment of corresponding synthetic ligands e.g. Shield-1, Trimethoprim or Methotrexate. 2-10 million HCT-116 cells stably transduced with the constructs are subcutaneously xenografted with matrigel into mice that capable of producing functional B and NK cells. Approximately, two weeks after injection, when the tumors reach a size of approximately 300 cubic mm, mice are dosed with corresponding stabilizing ligands e.g. Shield-1, Trimethoprim or Methotrexate at varying concentrations every two days. Shield-1 is injected with a carrier consisting of 10% Dimethylacetamide, 10% Solutol HS15, and 80% saline. Tumor volume and body weight are monitored twice a week and the experiment is terminated once the tumors reach 1000 cubic mm in size. Plasma and tumor samples are collected 8 hours after the last dose of the ligand and IL2 as well as the ligand levels are measured.

[1453] To evaluate the ability of IL2 expressing cells to form tumors, HCT-116 cells stably transduced with DD-IL2 constructs are pretreated with corresponding stabilizing ligands, Shield-1, Trimethoprim or Methotrexate and subsequently xenografted into mice. Reduction in tumor growth and a concomitant increase in IL2 levels in ligand treated mice compared to untreated controls is indicative conditional regulation of IL2 in vivo.

### Example 94. In Vivo Tracking of DD Luciferase Cells

[1454] DD luciferase constructs can be utilized as an optical reporter to asses if the ligand and/or the cells expressing the DD constructs reach the targeted tissue. It may also be utilized to study pharmacokinetic and pharmacodynamic (PK/PD) relationships in the context of DD. PK/PD depends on (i) the PK of the stabilizing ligand (ii) behavior of the DD in a specific cell type (iii) cargo protein behavior; some of which may be studied by utilizing the DD regulated luciferase constructs. DD luciferase constructs are expressed or co-expressed in cells of interest such as primary T cells or cell lines e.g. HCT-116, SKOV-3 cells and injected into immune compromised mice e.g. via tail vein, intra peritoneal, or subcutaneous injections. Mice are treated with the corresponding ligand or vehicle control. 8-24 hours following ligand injection, mice are injected with D-Luciferin when the payload is firefly luciferase and Coelentrazin when the payload is Renilla luciferase. Animals are anesthetized and imaged using the Bioluminescence imager (PerkinElmer, Massachusetts). The luciferase output of ligand injected mice is compared to control mice and the signal is quantitated using image analysis software (PerkinElmer, Massachusetts). Luciferase signal is expected to be much higher than background in mice treated with ligand compared to mice treated with vehicle control.

### Example 95. DD Regulated FOXP3 Expression

[1455] A fusion molecule is generated by fusing full length or truncated (FOXP3A2) and DDs such as ecDHFR (DD) or FKBP (DD). These fusion molecules were cloned into pLVX-IRES-Puro vectors.

[1456] To test ligand dependent FOXP3 production, 1 million HEK-293T cells were plated in a 6-well plate in growth media containing DMEM and 10% FBS and incubated overnight at 37° C., 5% CO2. Cells were transfected with the constructs using Lipofectamine 2000 and incubated for 24 hrs. Following the incubation, media was exchanged for growth medium with or without 10 μM Trimethoprim or 1 μM Shield-1 and further incubated for 24 hrs. Cells were harvested and FOXP3 levels were analyzed via western blotting using anti FOXP3 antibody (Abcam, Cambridge, UK). OT-FOXP3-003, and OT-FOXP3-007 showed the strongest Shield-1 dependent stabilization of FOXP3, while OT-FOXP3-008 showed the strongest Trimethoprim dependent stabilization of FOXP3 (FIG. 60A and FIG. 60B). Constructs OT-FOXP3-004 and OT-FOXP3-009 showed modest TMP and shield-1 dependent stabilization.

### Example 96. Ligand Dependent IL2 Stabilization In Vivo

[1457] An IL2 polypeptide was linked to either FKBP (F36V; L106P) or ecDHFR (R12Y, Y100I). IL2 constructs were packaged into pLVX-IRES-Puro lentiviral vectors. An IL2 signal sequence was inserted at the N terminus of the construct and linkers were placed between the signal sequence, the DD and IL2.

[1458] OT-IL2-001 (FKBP) was transduced into human colorectal carcinoma line, HCT-116. IL2 expression in vitro was confirmed by ELISA. To test in vivo ligand mediated regulation, 5 million HCT 116 cells transduced with IL2 constructs were injected subcutaneously into the flanks of immunocompromised mice. Approximately, two weeks after injection, when the tumors reach a size of approximately 300 cubic mm, mice are dosed with corresponding stabilizing ligands or corresponding vehicle control. Shield-1 is injected with a carrier consisting of 10% Dimethylacetamide, 10% Solutol HS15, and 80% saline at a concentration of 10 mg/kg body weight. Mice were euthanized at tumor and plasma samples were collected and analyzed for IL2 levels. Tumor IL2 levels were measured by ELISA as picograms per mg of protein. As shown in FIG. 61, tumor IL2 levels detected with Shield-1 treatment was higher than levels detected with vehicle control. These data demonstrate a dose dependent IL2 secretion from HCT116 cells stably expressing FKP-IL2 in vivo.

### Example 97. Optimization of T Cell Transduction and Expansion

[1459] The T cell expansion and transduction protocol consists of stimulating donor derived human T cells on day zero with aCD3/aCD28 bead stimulation to promote T cell proliferation. On day one, T cells were transduced with the construct of choice and expanded for up to day 11 with occasional media changes. On day 11, the beads were washed out and the cells were frozen in aliquots for use in various functional assays. The process of T cell expansion and transduction requires optimization to ensure the exponential proliferation of T cells, following the initial 4-day lag in growth of the T cells which is caused by the viral transduction. Unoptimized expansion protocol may result in static growth for up to 10 days requiring instead 21 days to achieve similar expected T cell number and a concomitant reduction in viability and abnormal CD4 to CD8 T cell ratio. The source of αCD3/αCD28 used for T cell stimulation and the ratio of the beads were tested to identify optimal conditions. αCD3/αCD28 beads from different sources were utilized. These included dynabeads (ThermoFisher, Waltham, MA), CD3/CD28+/−CD2 with anti-Biotin MACSiBead (Miltenyi Biotec, Germany), Macrobeads—3 μm magnetic polymer beads with αCD3/αCD28 antibody coating, soluble tetrameric antibody complexes of αCD3/αCD28 (StemCell, Canada). Bead and T cells were mixed at 3:1, 1:1, 1:3 and 1:9 ratios to identify optimal ratios for co-culture. Assays were also performed using two separate donors to account for donor related variabilities. Percentage cell viability was measured at 0, 4 and 7 days. As shown in FIG. 62, both donors showed improved cell viability counts at 1:3 bead to cell ratio compared to all other conditions, especially at day 4. One of the donors also showed improved cell viability at with 1:9 bead to cell ratio. Cell number counts were performed using both the cellometer and flow cytometry analysis. For this analysis, cells were infected with viruses at MOI of 10 and compared to mock (Lentiboost (LB) transduced cells to examine the effects of viral transduction on T cell counts. The fold change in cell growth at day 4 and day 7 compared to growth at day 0 was analyzed and the results from the cellometer counts are represented in Table 100.

TABLE 100
T cell proliferation

| Experimental | Donor1 | | Donor 2 | |
|---|---|---|---|---|
| condition | Day 4 | Day 7 | Day 4 | Day 7 |
| MOI 3:1 | 1.70 | 5.00 | 1.94 | 3.90 |
| MOI 1:1 | 2.15 | 3.95 | 2.55 | 4.30 |
| MOI 1:3 | 1.69 | 4.25 | 2.75 | 8.80 |
| MOI 1:9 | 1.65 | 3.70 | 3.91 | 6.35 |
| MOI Immuno Cult | 0.98 | 2.30 | 0.95 | 3.05 |
| LB 3:1 | 2.10 | 4.25 | 1.45 | 5.00 |
| LB 1:1 | 2.20 | 6.35 | 2.35 | 6.65 |
| LB 1:3 | 2.05 | 9.45 | 2.97 | 10.50 |
| LB 1:9 | 1.55 | 5.60 | 2.77 | 3.75 |
| LB Immuno Cult | 1.05 | 3.10 | 0.86 | 2.30 |

[1460] As shown in Table 100, the overall proliferation in both donors was greater at day 7 than at day 4. For donor 1, the proliferation at day 4 among the virally transduced cells was highest when an MOI of 10 was used in conjunction with a bead to cell ratio of 3:1, while donor 2 T cells proliferated the most at a ratio of 1:9. At day 7, 1:1 ratio for donor 1 and 1:3 ratio for donor 2 showed highest cell proliferation. Based on these results a bead to cell ratio of 1:3 was identified as optimal for promoting T cell proliferation.

[1461] T cells transduced at various multiplicity of infection (MOI) were also tested using flow cytometry. The results for donor 1 are shown in Table 101.

TABLE 101
Effect of viral titer and bead to cell ratio

| | | Bead to cell ratio | | | | |
|---|---|---|---|---|---|---|
| MOI | | 3:1 | 1:1 | 1:3 | 1:9 | Immunocult |
| 10 | MOI | 0.81 | 0.93 | 0.85 | 1.28 | 1.42 |
| 2 | MOI | 0.37 | 0.50 | 0.51 | 1.00 | 0.65 |
| 0.4 | MOI | 0.33 | 0.46 | 0.50 | 0.72 | 0.86 |

[1462] As shown in Table 101, bead ratio of 1:9 showed the highest cell viability among all conditions tested for donor 1. Similar results were obtained for donor 2.

[1463] Ratio of CD4 to CD8 within the proliferating T cell populations. At the start of the experiment, the CD4 to CD8 ratio was determined to be 3 and the skewing of populations. The results are shown in Table 102.

TABLE 102
CD4 to CD8 cell ratio

| | Donor 1 | | | | | Donor 2 | | | | |
|---|---|---|---|---|---|---|---|---|---|---|
| MOI | 3:1 | 1:1 | 1:3 | 1:9 | Immunocult | 3:1 | 1:1 | 1:3 | 1:9 | Immunocult |
| 10 | 8.63 | 8.73 | 5.84 | 3.7 | 7.44 | 4.53 | 3.25 | 2.56 | 1.65 | 2.75 |
| 2 | 9.6 | 9.91 | 7.18 | 4.11 | 6.45 | 5.25 | 3.16 | 2.04 | 1.56 | 3.23 |
| 0.4 | 10.85 | 11.33 | 7.51 | 4.23 | 5 | 6.22 | 4.71 | 2.59 | 1.43 | 3.55 |
| LB | 6.95 | 7.24 | 5.24 | 3.21 | 4.96 | 3.86 | 3.27 | 2.18 | 1.23 | 2.78 |

[1464] Donor 1 showed CD4 to CD8 ratio close to 3 when a bead to cell ratio of 1:9 was used. Similar results were obtained for donor 2 when a bead to cell ratio of 1:3 was used.

[1465] Taken together, these experiments show that activation induced cell death may occur when T cells are overstimulated by beads, and therefore optimal bead to T cell ratio is required. The experiments suggest that the optimal bead to cell ratio was 1:3 across various MOIs.

### Example 98. Analysis of BCMA CAR Expression

[1466] A BCMA CAR fusion polypeptide was linked to either to the N terminus of the FKBP-DD, ecDHFR-DD or human DHFR-DD and the constructs were cloned into pLVX-IRES-Puro vector under the transcriptional control of EF1a promoter.

[1467] To test ligand dependent expression of DD-BCMA CAR constructs, 1 million HEK HCT116 cells were cultured in growth medium containing DMEM and 10% FBS and transfected with CAR constructs using Lipofectamine 2000 or LentiBoost. 48 hours after transfection, cells were treated with 1 μM or 10 μM Shield-1, 10 μM Trimethoprim, 1 μM Methotrexate, or vehicle control and incubated for 24 hours. Surface expression of DD-BCMA CAR constructs in HCT116 cells was measured using Fluorescence activated cell sorting (FACS) with Protein L-Biotin-Strepavidin-Allophycocyanin which binds to the kappa light chain of the CAR (ThermoFisher Scientific, Waltham, MA). As shown in FIG. 63, surface expression of OT-BCMA-002 with FKBP-DD was elevated in the presence of Shield-1, while OT-BCMA-003 with ecDHFR-DD showed elevated surface expression in the presence of Trimethoprim. As expected, constitutively expressed construct OT-BCMA-001 showed high expression even in the absence of ligand.

### Example 99. Analysis of CAR Expression and Function

[1468] The expression of chimeric antigen receptors described herein such as, but not limited to CD22 CAR, ALK CAR, CD33 CAR, HER2 CAR and GD2 CAR constructs are fused to destabilizing domains such as ecDHFR DD, FKBP DD and hDHFR DDs. To test ligand dependent expression of the constructs, immune cells are cultured in growth medium containing DMEM and 10% and transduced are transduced with the CAR constructs. 48 hours after transduction, cells are treated with the ligand corresponding to the DD such as 1 μM or 10 μM Shield-1, 10 μM Trimethoprim, 1 μM Methotrexate, or vehicle control and incubated for 24 hours. Cells are then analyzed by western blot using the CD3 Zeta, a component of the CAR. Surface expression of the CAR is analyzed by FACS using Protein L. Intracellular and surface expression of CARs is expected to be undetectable in the absence of ligand, but strongly induced by the presence of the ligand.

[1469] The efficacy of T cells expressing DD regulated CAR constructs in functionally interacting with target cells is evaluated. To interact with the CAR T cells, the chosen target cells express the antigen related to the CAR either naturally or ectopically. For example, target cells which have high endogenous expression of BCMA include KMS11, MM-1S, RPMI-8226 cells; target cells expressing CD33 include HL-60, MOLM13, MOLM14 cells. Alternatively, target cell lines may be engineered to ectopically express the antigen in cell lines that have low endogenous expression of the antigen.

[1470] Multiple assays are used to measure functionality. Prior to co culture, the target cells are optionally cultured in the presence of mitomycin C to prevent target cell proliferation. This ensures that target cell growth does not out compete T cell growth. Cytotoxicity assays are used to measure the ability of T cells induce target cell death. Target cells are engineered to express Renilla or Firefly luciferase and co cultured with T cells expressing DD regulated CAR constructs for 18 to 24 hours in the presence of the ligand related to the DD or vehicle control. At the end of co culture, cells are lysed and luciferase activity is measured using appropriate substrate. Luciferase activity is expected to increase when DD regulated CAR expressing T cells are co cultured with antigen expressing target cells in the presence of ligand. Cytotoxicity is not expected in vehicle control cells or when the target cells do not express the antigen are utilized.

[1471] Cytolytic potential of DD CAR expressing cells is evaluated in primary human T cells or human cell lines (e.g. NALM6, K562 and Raji) using Chromium-51 Release Assay. Target cells are loaded with of Na₂ ⁵¹CrO₄, washed twice and resuspended in phenol red-free growth medium. Untreated or ligand treated DD CAR and mock transduced cells are co-incubated with cognate antigen expressing target cells at various effector: target cell ratios, and chromium release into the supernatant is measured using a liquid scintillation counter. Cells with DD CAR are expected to demonstrate specific cytolysis only in the presence of ligand. Cells with DDCAR in the absence of ligand or mock transfected cells are expected to show minimal cytolytic activity.

[1472] Activation of T cells results in degranulation, an exocytic process by which cytotoxic T cells release molecules like perforin and granzymes which enable target cell killing. Degranulation is measured by analysis of media for indications of exocytosis e.g. CD107 by FACS and by markers of degranulation such as perforin and granzyme using immunoassays.

[1473] Engagement of the CAR with its cognate antigen results in the activation of T cells is measured 24 hours after co culture of CAR expressing T cells and target cells. Activation of T cells is evaluated by measuring levels of IFNg, IL2, and CD69. T cell proliferation in response to antigen mediated T cell activation is measured by labelling T cells with Carboxyfluorescein succinimidyl ester, which is used to trace cells across multiple generations. Labelled T cells are cultured with Mitomycin treated target cells and cell proliferation is tracked over a period of 3 to 5 days. T cell proliferation and activation is expected to increase when DD regulated CAR expressing T cells are co cultured with cognate antigen expressing target cells in the presence of ligand. Both parameters are not expected in to change in vehicle control cells or when the target cells do not express antigen are utilized.

[1474] To measure the ability of DD regulated CARs to promote tumor-free survival, mice are injected intravenously with antigen positive target cells. Following injections, mice are treated with untransduced mock T cells or T cells that are transduced with antigen specific chimeric antigen receptors. Mice are then split into two cohorts; one cohort is treated with the ligand specific to the SRE and the second cohort which is treated with the vehicle control. Survival of the mice is monitored for up to 80 days after the administration of target cells. Tumor bearing mice treated with CAR transduced T cells and the ligand, are expected to survive longer than mice treated with untransduced cells; vector control transduced T cells or vehicle control.

[1475] To measure ligand induced reduction in tumor growth, mice are injected orthotopically with antigen positive target cells on day 0. The mice are then treated with cyclophosphamide intraperitoneally on day 3. Cells are treated with antigen specific CAR construct. The mice are treated with recombinant interleukin 7 or interleukin 7 complexed with IL7 antibody, two-three times a week for three weeks to promote T cell persistence. Mice are then split into two cohorts; one cohort is treated with the ligand specific to the SRE and the second cohort which is treated with the vehicle control. The size of the tumors is measured at various time points after inoculation. Mice treated with antigen specific CAR and the ligand are expected to be tumor free while mice treated with mock transduced cells, or vehicle controlled cells are predicted to succumb to the tumors

[1476] To test if DD regulated CARs can cause regression of established tumors in a ligand dependent fashion, mice are orthotopically inoculated with antigen positive T cells expressing luciferase. Tumors are allowed to grow for 8 days, and the growth is monitored using bioluminescent imaging. On day 8, after tumor inoculation, CAR transduced cells are injected intravenously with or without cytokine and cytotoxic therapy augmentation. Concurrent ligand or vehicle control treatment is also initiated. Mice treated with CAR T cells are expected to show tumor regression and long term disease control in the presence of ligand, whereas all mice treated with mock transduced cells are expected to succumb to progressive tumor growth.

### Example 100. Measuring T Cell Exhaustion Phenotype and its Reversal

[1477] Primary T cells are activated using soluble CD3/CD28 or CD3/CD28 dynabeads. 24 hours later, cells are transduced with DD regulated CD19 CAR constructs and allowed to rest for 24 hours. Cells are then treated with the ligand specific to the SRE or vehicle control. At day 4, the CD3/CD28 beads are removed and the cells are cultured for another 3 days. At day 7, cells are washed extensively to remove the ligand and replated in the absence of the ligand and cultured for 3 days. At day 10, cells were washed and replated in the absence of ligand. A sample of the cells are analyzed at day 10 for phenotypic and functional markers associated with exhaustion. The rest of the cells are cultured for 3 days in the absence of ligand and analyzed for phenotypic and functional exhaustion markers at day 14. T cells cultured for the duration of the experiment either in the presence or absence of ligand are included as controls. Phenotypic markers for exhaustion such as PD1, TIM3, LAG3, BTLA, CD160, 2B4, and CD39a are measured both in CD4 and CD8 T cell populations. Since chronic T cell activation has been shown to result in T cell exhaustion, T cells cultured under the continuous presence of ligand throughout the experiment are expected to be positive for multiple markers of exhaustion. T cells cultured in the absence of ligand throughout the experiment are expected to negative for multiple markers of exhaustion, since the expression of the CAR will be undetectable/low in the absence of ligand. At day 10, cells where the ligand is removed at day 7 are expected to have a lower percentage of cells that are positive for multiple exhaustion markers when compared to cells that have been treated with ligand throughout the duration of the experiment. This result is expected in both CD8 and CD4 population of T cells.

### Example 101. Dual Specific Chimeric Antigen Receptor

[1478] Human T cells are transduced with a lentiviral vector encoding dual specific chimeric antigen receptors. Dual specific CARs targets include, but not limited to GD2, CD33, BCMA, Her2, ALK, CD22 and CD276. Cells are cultured in the presence of ligand or vehicle control for 24-48 hours. Additional controls such as human T cells that are mock transduced or transduced with a vector encoding septicity to one antigen only are included. CAR expression is evaluated by flow cytometry using anti-idiotype CAR antibody. Expression of dual specific CAR is expected only in cells transduced with dual specific CAR construct in the presence of ligand, while the controls transduced with the CAR constructs showing single specificity are expected to show expression of the single CAR construct, and in the presence of ligand.

[1479] T cells are also analyzed for proliferation, markers of apoptosis and memory phenotype. Cells are cultured per methods described above. Ligand is removed either at day 7 or day 10 and cells are analyzed at day 14 for apoptosis using Annexin V staining and for the memory phenotype using CD62L as the marker. When compared to untreated cells, cells continuously treated with ligand are expected to show an increase in apoptotic cells, a decrease in proliferation and a decrease in CD62L expression, which are indicative of T cell exhaustion. Ligand withdrawal at day 7 or day 10 is expected to show low Annexin V and high CD62L expression, and an increase in proliferation similar to untreated cells.

### Example 102. Measuring T Cell Exhaustion Phenotype and its Reversal

[1480] Primary T cells are activated using soluble CD3/CD28 or CD3/CD28 dynabeads. 24 hours later, cells are transduced with DD regulated CD19 CAR constructs and allowed to rest for 24 hours. Cells are then treated with the ligand specific to the SRE or vehicle control. At day 4, the CD3/CD28 beads are removed and the cells are cultured for another 3 days. At day 7, cells are washed extensively to remove the ligand and replated in the absence of the ligand and cultured for 3 days. At day 10, cells were washed and replated in the absence of ligand. A sample of the cells are analyzed at day 10 for phenotypic and functional markers associated with exhaustion. The rest of the cells are cultured for 3 days in the absence of ligand and analyzed for phenotypic and functional exhaustion markers at day 14. T cells cultured for the duration of the experiment either in the presence or absence of ligand are included as controls. Phenotypic markers for exhaustion such as PD1, TIM3, LAG3, BTLA, CD160, 2B4, and CD39a are measured both in CD4 and CD8 T cell populations. Since chronic T cell activation has been shown to result in T cell exhaustion, T cells cultured under the continuous presence of ligand throughout the experiment are expected to be positive for multiple markers of exhaustion. T cells cultured in the absence of ligand throughout the experiment are expected to be negative for multiple markers of exhaustion, since the expression of the CAR will be undetectable/low in the absence of ligand. At day 10, cells where the ligand is removed at day 7 are expected to have a lower percentage of cells that are positive for multiple exhaustion markers when compared to cells that have been treated with ligand throughout the duration of the experiment. This result is expected in both CD8 and CD4 population of T cells.

[1481] T cells are also analyzed for proliferation, markers of apoptosis and memory phenotype. Cells are cultured per methods described above. Ligand is removed either at day 7 or day 10 and cells are analyzed at day 14 for apoptosis using Annexin V staining and for the memory phenotype using CD62L as the marker. When compared to untreated cells, cells continuously treated with ligand are expected to show an increase in apoptotic cells, a decrease in proliferation and a decrease in CD62L expression, which are indicative of T cell exhaustion. Ligand withdrawal at day 7 or day 10 is expected to show low Annexin V and high CD62L expression, and an increase in proliferation similar to untreated cells.

### Example 103. Functional Analysis of Reversal of T Cell Exhaustion

[1482] The functionality of T cells expressing DD regulated CAR constructs is evaluated by measuring cytokine release. T cells expressing DD CAR constructs are co cultured with target cells expressing the antigen (endogenously or ectopically). T cells are activated at day 0 using CD3/CD28 beads. 24 hours later, cells are transduced with DD regulated CAR constructs and allowed to rest for 24 hours. Cells are then treated with the ligand specific to the SRE or vehicle control. At day 4, the CD3/CD28 beads are removed and the cells are cultured for another 3 days. At day 7, cells are washed extensively to remove the ligand and replated in the absence of the ligand and cultured for 3 days. In an additional experimental condition, cells are treated with ligand till day 10 instead of day 7. T cells cultured for the duration of the experiment either in the presence or absence of ligand are included as controls. Supernatant was collected from cells after 24 hours and IL2 and IFNg levels were measured as a read out of T cell function. When compared to untreated cells, cells continuously treated with ligand are expected to show an increase in IL2 and IFNg expression at day 14, which are indicative of functional T cells. Ligand withdrawal at day 7 or day 10 is expected to minimally affect the levels of IFNg and IL2 levels.

[1483] The ability of biocircuits of the invention to functionally rescue the exhausted T cells is also evaluated. T cells treated with ligand till day 10 are sorted and selected for cells that are positive for chimeric antigen receptor as well as multiple exhaustion makers (e.g. PD1, TIM3, LAG3). The cells are divided into two groups, one group is treated with ligand, while the second group is treated with vehicle control. Functionality of T cells is measured using IL2 levels as a surrogate. Ligand withdrawal is predicted to reverse T cell exhaustion, and hence cells subject to ligand withdrawal at day 10 are expected to have higher IL2 levels compared to ligand treated cells.

### Embodiments

[1484] 1. In embodiment one, a biocircuit system comprising at least one effector module, said effector module comprising
[1485] (a) a stimulus response element (SRE) and
[1486] (b) at least one payload, said payload comprising a protein of interest which is attached, appended or associated with said SRE, wherein said SRE comprises a destabilizing domain (DD), said DD comprising, in whole or in part, a protein selected from the group consisting of human dihydrofolate reductase (hDHFR; SEQ ID NO. 1), a hDHFR mutant and a hDHFR variant.
[1487] 2. In the biocircuit system of embodiment 1, wherein the DD comprises, in whole or in part, a hDHFR mutant.
[1488] 3. In embodiment 1 or 2, wherein the effector module is responsive to one or more stimuli.
[1489] 4. The biocircuit system of embodiment 2, wherein the hDHFR mutant comprises one, two, three or more mutations relative to SEQ ID NO. 1, said mutation selected from the group consisting of M1del, V2A, C7R, I8V, V9A, A10T, A10V, Q13R, N14S, G16S, I17N, I17V, K19E, N20D, G21T, G21E, D22S, L23S, P24S, L28P, N30D, N30H, N30S, E31G, E31D, F32M, R33G, R33S, F35L, Q36R, Q36S, Q36K, Q36F, R37G, M38V, M38T, T40A, V44A, K47R, N49S, N49D, M53T, G54R, K56E, K56R, T57A, F59S, I61T, K64R, N65A, N65S, N65D, N65F, L68S, K69E, K69R, R71G, I72T, I72A, I72V, N73G, L74N, V75F, R78G, L80P, K81R, E82G, H88Y, F89L, R92G, S93G, S93R, L94A, D96G, A97T, L98S, K99G, K99R, L100P, E102G, Q103R, P104S, E105G, A107T, A107V, N108D, K109E, K109R, V110A, D111N, M112T, M112V, V113A, W114R, I115V, I115L, V116I, G117D, V121A, Y122C, Y122D, Y122I, K123R, K123E, A125F, M126I, N127R, N127S, N127Y, H128R, H128Y, H131R, L132P, K133E, L134P, F135P, F135L, F135S, F135V, V136M, T137R, R138G, R138I, I139T, I139V, M140I, M140V, Q141R, D142G, F143S, F143L, E144G, D146G, T147A, F148S, F148L, F149L, P150L, E151G, I152V, D153A, D153G, E155G, K156R, Y157R, Y157C, K158E, K158R, L159P, L160P, E162G, Y163C, V166A, S168C, D169G, V170A, Q171R, E172G, E173G, E173A, K174R, I176A, I176F, I176T, K177E, K177R, Y178C, Y178H, F180L, E181G, V182A, Y183C, Y183H, E184R, E184G, K185R, K185del, K185E, N186S, N186D, D187G, and D187N.
[1490] 5. The biocircuit system of any of embodiments 1-4, wherein the hDHFR mutant comprises one, or more mutations which are made to result in an amino acid at the mutation site being identical to one or more vicinal amino acids, wherein the vicinal amino acid is selected from one, two, three, four, and five amino acids, upstream or downstream from the mutation.
[1491] 6. The biocircuit system of embodiment 4, wherein the hDHFR mutant is selected from the group consisting of hDHFR (A107V), comprising the amino acid sequence of SEQ ID NO. 6415; hDHFR (F59S), comprising the amino acid sequence of SEQ ID NO. 6416; hDHFR (I17V), comprising the amino acid sequence of SEQ ID NO. 6417; hDHFR (K185E), comprising the amino acid sequence of SEQ ID NO. 6418; hDHFR (K81R), comprising the amino acid sequence of SEQ ID NO. 6419; hDHFR (M140I), comprising the amino acid sequence of SEQ ID NO. 6420; hDHFR (N127Y), comprising the amino acid sequence of SEQ ID NO. 6421; hDHFR (N186D), comprising the amino acid sequence of SEQ ID NO. 6422; hDHFR (N65D), comprising the amino acid sequence of SEQ ID NO. 6423; hDHFR (Y122I), comprising the amino acid sequence of SEQ ID NO. 6424; hDHFR (A10V, H88Y), comprising the amino acid sequence of SEQ ID NO. 6425; hDHFR (Amino acid 2-187 of WT) (Y122I), comprising the amino acid sequence of SEQ ID NO. 6426; hDHFR (C7R, Y163C), comprising the amino acid sequence of SEQ ID NO. 6427; hDHFR (E162G, I176F), comprising the amino acid sequence of SEQ ID NO. 6428; hDHFR (G21T, Y122I), comprising the amino acid sequence of SEQ ID NO. 6429; hDHFR (H131R, E144G), comprising the amino acid sequence of SEQ ID NO. 6430; hDHFR (117V, Y122I), comprising the amino acid sequence of SEQ ID NO. 6431; hDHFR (L74N, Y122I), comprising the amino acid sequence of SEQ ID NO. 6432; hDHFR (L94A, T147A), comprising the amino acid sequence of SEQ ID NO. 6433; hDHFR (M53T, R138I), comprising the amino acid sequence of SEQ ID NO. 6434; hDHFR (N127Y, Y122I), comprising the amino acid sequence of SEQ ID NO. 6435; hDHFR (Q36K, Y122I), comprising the amino acid sequence of SEQ ID NO. 6436; hDHFR (T137R, F143L), comprising the amino acid sequence of SEQ ID NO. 6437; hDHFR (T57A, I72A), comprising the amino acid sequence of SEQ ID NO. 6438; hDHFR (V121A, Y122I), comprising the amino acid sequence of SEQ ID NO. 6439; hDHFR (V75F, Y122I), comprising the amino acid sequence of SEQ ID NO. 6440; hDHFR (Y122I, A125F), comprising the amino acid sequence of SEQ ID NO. 6441; hDHFR (Y122I, M140I), comprising the amino acid sequence of SEQ ID NO. 6442; hDHFR (Y178H, E181G), comprising the amino acid sequence of SEQ ID NO. 6443; hDHFR (Y183H, K185E), comprising the amino acid sequence of SEQ ID NO. 6444; hDHFR (Amino acid 2-187 of WT) (G21T, Y122I), comprising the amino acid sequence of SEQ ID NO. 6445; hDHFR (Amino acid 2-187 of WT) (I17V, Y122I), comprising the amino acid sequence of SEQ ID NO. 6446; hDHFR (Amino acid 2-187 of WT) (L74N, Y122I), comprising the amino acid sequence of SEQ ID NO. 6447; hDHFR (Amino acid 2-187 of WT) (L94A, T147A), comprising the amino acid sequence of SEQ ID NO. 6448; hDHFR (Amino acid 2-187 of WT) (M53T, R138I), comprising the amino acid sequence of SEQ ID NO. 6449; hDHFR (Amino acid 2-187 of WT) (N127Y, Y122I), comprising the amino acid sequence of SEQ ID NO. 6450; hDHFR (Amino acid 2-187 of WT) (Q36K, Y122I), comprising the amino acid sequence of SEQ ID NO. 6451; hDHFR (Amino acid 2-187 of WT) (V121A, Y122I), comprising the amino acid sequence of SEQ ID NO. 6452; hDHFR (Amino acid 2-187 of WT) (V75F, Y122I), comprising the amino acid sequence of SEQ ID NO. 6453; hDHFR (Amino acid 2-187 of WT) (Y122I, A125F), comprising the amino acid sequence of SEQ ID NO. 6454; hDHFR (Amino acid 2-187 of WT) (Y122I, M140I), comprising the amino acid sequence of SEQ ID NO. 6455; hDHFR (E31D, F32M, V116I), comprising the amino acid sequence of SEQ ID NO. 6456; hDHFR (G21E, I72V, I176T), comprising the amino acid sequence of SEQ ID NO. 6457; hDHFR (I8V, K133E, Y163C), comprising the amino acid sequence of SEQ ID NO. 6458; hDHFR (K19E, F89L, E181G), comprising the amino acid sequence of SEQ ID NO. 6459; hDHFR (L23S, V121A, Y157C), comprising the amino acid sequence of SEQ ID NO. 6460; hDHFR (N49D, F59S, D153G), comprising the amino acid sequence of SEQ ID NO. 6461; hDHFR (Q36F, N65F, Y122I), comprising the amino acid sequence of SEQ ID NO. 6462; hDHFR (Q36F, Y122I, A125F), comprising the amino acid sequence of SEQ ID NO. 6463; hDHFR (V110A, V136M, K177R), comprising the amino acid sequence of SEQ ID NO. 6464; hDHFR (V9A, S93R, P150L), comprising the amino acid sequence of SEQ ID NO. 6465; hDHFR (Y122I, H131R, E144G), comprising the amino acid sequence of SEQ ID NO. 6466; hDHFR (G54R, I115L, M140V, S168C), comprising the amino acid sequence of SEQ ID NO. 6467; hDHFR (Amino acid 2-187 of WT) (E31D, F32M, V116I), comprising the amino acid sequence of SEQ ID NO. 6468; hDHFR (Amino acid 2-187 of WT) (Q36F, N65F, Y122I), comprising the amino acid sequence of SEQ ID NO. 6469; hDHFR (Amino acid 2-187 of WT) (Q36F, Y122I, A125F), comprising the amino acid sequence of SEQ ID NO. 6470; hDHFR (Amino acid 2-187 of WT) (Y122I, H131R, E144G), comprising the amino acid sequence of SEQ ID NO. 6471; hDHFR (V2A, R33G, Q36R, L100P, K185R), comprising the amino acid sequence of SEQ ID NO. 6472; hDHFR(D22S, F32M, R33S, Q36S, N65S), comprising the amino acid sequence of SEQ ID NO. 6473; hDHFR (Amino acid 2-187 of WT) (D22S, F32M, R33S, Q36S, N65S), comprising the amino acid sequence of SEQ ID NO. 6474; hDHFR (I17N, L98S, K99R, M112T, E151G, E162G, E172G), comprising the amino acid sequence of SEQ ID NO. 6475; hDHFR (G16S, I17V, F89L, D96G, K123E, M140V, D146G, K156R), comprising the amino acid sequence of SEQ ID NO. 6476; hDHFR (K81R, K99R, L100P, E102G, N108D, K123R, H128R, D142G, F180L, K185E), comprising the amino acid sequence of SEQ ID NO. 6477; hDHFR (R138G, D142G, F143S, K156R, K158E, E162G, V166A, K177E, Y178C, K185E, N186S), comprising the amino acid sequence of SEQ ID NO. 6478; hDHFR (N14S, P24S, F35L, M53T, K56E, R92G, S93G, N127S, H128Y, F135L, F143S, L159P, L160P, E173A, F180L), comprising the amino acid sequence of SEQ ID NO. 6479; hDHFR (F35L, R37G, N65A, L68S, K69E, R71G, L80P, K99G, G117D, L132P, I139V, M140I, D142G, D146G, E173G, D187G), comprising the amino acid sequence of SEQ ID NO. 6480; hDHFR (L28P, N30H, M38V, V44A, L68S, N73G, R78G, A97T, K99R, A107T, K109R, D111N, L134P, F135V, T147A, I152V, K158R, E172G, V182A, E184R), comprising the amino acid sequence of SEQ ID NO. 6481; hDHFR (V2A, I17V, N30D, E31G, Q36R, F59S, K69E, I72T, H88Y, F89L, N108D, K109E, V110A, I115V, Y122D, L132P, F135S, M140V, E144G, T147A, Y157C, V170A, K174R, N186S), comprising the amino acid sequence of SEQ ID NO. 6482; hDHFR (L100P, E102G, Q103R, P104S, E105G, N108D, V113A, W114R, Y122C, M126I, N127R, H128Y, L132P, F135P, 1139T, F148S, F149L, I152V, D153A, D169G, V170A, I176A, K177R, V182A, K185R, N186S), comprising the amino acid sequence of SEQ ID NO. 6483; and hDHFR (A10T, Q13R, N14S, N20D, P24S, N30S, M38T, T40A, K47R, N49S, K56R, I61T, K64R, K69R, I72A, R78G, E82G, F89L, D96G, N108D, M112V, W114R, Y122D, K123E, I139V, Q141R, D142G, F148L, E151G, E155G, Y157R, Q171R, Y183C, E184G, K185del, D187N), comprising the amino acid sequence of SEQ ID NO. 6484.
[1492] 7. The biocircuit system of embodiment 6, wherein the hDHFR mutant is encoded by a nucleic acid sequence independently selected from any of SEQ ID NOs. 6485-6499, 6500-6553, or 6554.
[1493] 8. The biocircuit system of embodiment 3, wherein said one or more stimuli is Trimethoprim (TMP) or Methotrexate (MTX).
[1494] 9 The biocircuit system of any of embodiments 3-6 or 8, wherein the hDHFR mutant comprises one or more mutations in a region that does interact directly with the stimulus.
[1495] 10. An effector module comprising a hDHFR-derived SRE operably linked to a payload, wherein the hDHFR-derived SRE is a hDHFR mutant comprising one, two, three or more mutations selected from M1del, V2A, C7R, I8V, V9A, A10T, A10V, Q13R, N14S, G16S, I17N, I17V, K19E, N20D, G21T, G21E, D22S, L23S, P24S, L28P, N30D, N30H, N30S, E31G, E31D, F32M, R33G, R33S, F35L, Q36R, Q36S, Q36K, Q36F, R37G, M38V, M38T, T40A, V44A, K47R, N49S, N49D, M53T, G54R, K56E, K56R, T57A, F59S, I61T, K64R, N65A, N65S, N65D, N65F, L68S, K69E, K69R, R71G, I72T, I72A, I72V, N73G, L74N, V75F, R78G, L80P, K81R, E82G, H88Y, F89L, R92G, S93G, S93R, L94A, D96G, A97T, L98S, K99G, K99R, L100P, E102G, Q103R, P104S, E105G, A107T, A107V, N108D, K109E, K109R, V110A, D111N, M112T, M112V, V113A, W114R, I115V, I115L, V116I, G117D, V121A, Y122C, Y122D, Y122I, K123R, K123E, A125F, M126I, N127R, N127S, N127Y, H128R, H128Y, H131R, L132P, K133E, L134P, F135P, F135L, F135S, F135V, V136M, T137R, R138G, R138I, I139T, I139V, M140I, M140V, Q141R, D142G, F143S, F143L, E144G, D146G, T147A, F148S, F148L, F149L, P150L, E151G, 1152V, D153A, D153G, E155G, K156R, Y157R, Y157C, K158E, K158R, L159P, L160P, E162G, Y163C, V166A, S168C, D169G, V170A, Q171R, E172G, E173G, E173A, K174R, 1176A, 1176F, 1176T, K177E, K177R, Y178C, Y178H, F180L, E181G, V182A, Y183C, Y183H, E184R, E184G, K185R, K185del, K185E, N186S, N186D, D187G, and D187N.
[1496] 11. The effector module of embodiment 10, wherein the DHFR-derived SRE is selected from hDHFR (A107V), comprising the amino acid sequence of SEQ ID NO. 6555; hDHFR (F59S), comprising the amino acid sequence of SEQ ID NO. 6556; hDHFR (I17V), comprising the amino acid sequence of SEQ ID NO. 6557; hDHFR (K185E), comprising the amino acid sequence of SEQ ID NO. 6558; hDHFR (K81R), comprising the amino acid sequence of SEQ ID NO. 6559; hDHFR (M140I), comprising the amino acid sequence of SEQ ID NO. 6560; hDHFR (N127Y), comprising the amino acid sequence of SEQ ID NO. 6561; hDHFR (N186D), comprising the amino acid sequence of SEQ ID NO. 6562; hDHFR (N65D), comprising the amino acid sequence of SEQ ID NO. 6563; hDHFR (Y122I), comprising the amino acid sequence of SEQ ID NO. 6564; hDHFR (A10V, H88Y), comprising the amino acid sequence of SEQ ID NO. 6565; hDHFR (Amino acid 2-187 of WT) (Y122I), comprising the amino acid sequence of SEQ ID NO. 6566; hDHFR (C7R, Y163C), comprising the amino acid sequence of SEQ ID NO. 6567; hDHFR (E162G, I176F), comprising the amino acid sequence of SEQ ID NO. 6568; hDHFR (G21T, Y122I), comprising the amino acid sequence of SEQ ID NO. 6569; hDHFR (H131R, E144G), comprising the amino acid sequence of SEQ ID NO. 6570; hDHFR (I17V, Y122I), comprising the amino acid sequence of SEQ ID NO. 6571; hDHFR (L74N, Y122I), comprising the amino acid sequence of SEQ ID NO. 6572; hDHFR (L94A, T147A), comprising the amino acid sequence of SEQ ID NO. 6573; hDHFR (M53T, R138I), comprising the amino acid sequence of SEQ ID NO. 6574; hDHFR (N127Y, Y122I), comprising the amino acid sequence of SEQ ID NO. 6575; hDHFR (Q36K, Y122I), comprising the amino acid sequence of SEQ ID NO. 6576; hDHFR (T137R, F143L), comprising the amino acid sequence of SEQ ID NO. 6577; hDHFR (T57A, I72A), comprising the amino acid sequence of SEQ ID NO. 6578; hDHFR (V121A, Y122I), comprising the amino acid sequence of SEQ ID NO. 6579; hDHFR (V75F, Y122I), comprising the amino acid sequence of SEQ ID NO. 6580; hDHFR (Y122I, A125F), comprising the amino acid sequence of SEQ ID NO. 6581; hDHFR (Y122I, M140I), comprising the amino acid sequence of SEQ ID NO. 6582; hDHFR (Y178H, E181G), comprising the amino acid sequence of SEQ ID NO. 6583; hDHFR (Y183H, K185E), comprising the amino acid sequence of SEQ ID NO. 6584; hDHFR (Amino acid 2-187 of WT) (G21T, Y122I), comprising the amino acid sequence of SEQ ID NO. 6585; hDHFR (Amino acid 2-187 of WT) (I17V, Y122I), comprising the amino acid sequence of SEQ ID NO. 6586; hDHFR (Amino acid 2-187 of WT) (L74N, Y122I), comprising the amino acid sequence of SEQ ID NO. 6587; hDHFR (Amino acid 2-187 of WT) (L94A, T147A), comprising the amino acid sequence of SEQ ID NO. 6588; hDHFR (Amino acid 2-187 of WT) (M53T, R138I), comprising the amino acid sequence of SEQ ID NO. 6589; hDHFR (Amino acid 2-187 of WT) (N127Y, Y122I), comprising the amino acid sequence of SEQ ID NO. 6590; hDHFR (Amino acid 2-187 of WT) (Q36K, Y122I), comprising the amino acid sequence of SEQ ID NO. 6591; hDHFR (Amino acid 2-187 of WT) (V121A, Y122I), comprising the amino acid sequence of SEQ ID NO. 6592; hDHFR (Amino acid 2-187 of WT) (V75F, Y122I), comprising the amino acid sequence of SEQ ID NO. 6593; hDHFR (Amino acid 2-187 of WT) (Y122I, A125F), comprising the amino acid sequence of SEQ ID NO. 6594; hDHFR (Amino acid 2-187 of WT) (Y122I, M140I), comprising the amino acid sequence of SEQ ID NO. 6595; hDHFR (E31D, F32M, V116I), comprising the amino acid sequence of SEQ ID NO. 6596; hDHFR (G21E, I72V, I176T), comprising the amino acid sequence of SEQ ID NO. 6597; hDHFR (I8V, K133E, Y163C), comprising the amino acid sequence of SEQ ID NO. 6598; hDHFR (K19E, F89L, E181G), comprising the amino acid sequence of SEQ ID NO. 6599; hDHFR (L23S, V121A, Y157C), comprising the amino acid sequence of SEQ ID NO. 6600; hDHFR (N49D, F59S, D153G), comprising the amino acid sequence of SEQ ID NO. 6601; hDHFR (Q36F, N65F, Y122I), comprising the amino acid sequence of SEQ ID NO. 6602; hDHFR (Q36F, Y122I, A125F), comprising the amino acid sequence of SEQ ID NO. 6603; hDHFR (V110A, V136M, K177R), comprising the amino acid sequence of SEQ ID NO. 6604; hDHFR (V9A, S93R, P150L), comprising the amino acid sequence of SEQ ID NO. 6605; hDHFR (Y122I, H131R, E144G), comprising the amino acid sequence of SEQ ID NO. 6606; hDHFR (G54R, I115L, M140V, S168C), comprising the amino acid sequence of SEQ ID NO. 6607; hDHFR (Amino acid 2-187 of WT) (E31D, F32M, V116I), comprising the amino acid sequence of SEQ ID NO. 6608; hDHFR (Amino acid 2-187 of WT) (Q36F, N65F, Y122I), comprising the amino acid sequence of SEQ ID NO. 6609; hDHFR (Amino acid 2-187 of WT) (Q36F, Y122I, A125F), comprising the amino acid sequence of SEQ ID NO. 6610; hDHFR (Amino acid 2-187 of WT) (Y122I, H131R, E144G), comprising the amino acid sequence of SEQ ID NO. 6611; hDHFR (V2A, R33G, Q36R, L100P, K185R), comprising the amino acid sequence of SEQ ID NO. 6612; hDHFR(D22S, F32M, R33S, Q36S, N65S), comprising the amino acid sequence of SEQ ID NO. 6613; hDHFR (Amino acid 2-187 of WT) (D22S, F32M, R33S, Q36S, N65S), comprising the amino acid sequence of SEQ ID NO. 6614; hDHFR (I17N, L98S, K99R, M112T, E151G, E162G, E172G), comprising the amino acid sequence of SEQ ID NO. 6615; hDHFR (G16S, I17V, F89L, D96G, K123E, M140V, D146G, K156R), comprising the amino acid sequence of SEQ ID NO. 6616; hDHFR (K81R, K99R, L100P, E102G, N108D, K123R, H128R, D142G, F180L, K185E), comprising the amino acid sequence of SEQ ID NO. 6617; hDHFR (R138G, D142G, F143S, K156R, K158E, E162G, V166A, K177E, Y178C, K185E, N186S), comprising the amino acid sequence of SEQ ID NO. 6618; hDHFR (N14S, P24S, F35L, M53T, K56E, R92G, S93G, N127S, H128Y, F135L, F143S, L159P, L160P, E173A, F180L), comprising the amino acid sequence of SEQ ID NO. 6619; hDHFR (F35L, R37G, N65A, L68S, K69E, R71G, L80P, K99G, G117D, L132P, I139V, M140I, D142G, D146G, E173G, D187G), comprising the amino acid sequence of SEQ ID NO. 6620; hDHFR (L28P, N30H, M38V, V44A, L68S, N73G, R78G, A97T, K99R, A107T, K109R, D111N, L134P, F135V, T147A, I152V, K158R, E172G, V182A, E184R), comprising the amino acid sequence of SEQ ID NO. 6621; hDHFR (V2A, I17V, N30D, E31G, Q36R, F59S, K69E, I72T, H88Y, F89L, N108D, K109E, V110A, I115V, Y122D, L132P, F135S, M140V, E144G, T147A, Y157C, V170A, K174R, N186S), comprising the amino acid sequence of SEQ ID NO. 6622; hDHFR (L100P, E102G, Q103R, P104S, E105G, N108D, V113A, W114R, Y122C, M126I, N127R, H128Y, L132P, F135P, 1139T, F148S, F149L, I152V, D153A, D169G, V170A, I176A, K177R, V182A, K185R, N186S), comprising the amino acid sequence of SEQ ID NO. 6623; and hDHFR (A10T, Q13R, N14S, N20D, P24S, N30S, M38T, T40A, K47R, N49S, K56R, I61T, K64R, K69R, I72A, R78G, E82G, F89L, D96G, N108D, M112V, W114R, Y122D, K123E, I139V, Q141R, D142G, F148L, E151G, E155G, Y157R, Q171R, Y183C, E184G, K185del, D187N), comprising the amino acid sequence of SEQ ID NO. 6624.
[1497] 12. The effector module of embodiment 10 or 11, wherein the payload is a natural protein or a variant thereof, or a fusion polypeptide, or an antibody or a fragment thereof, or a therapeutic agent, or a gene therapy agent.
[1498] 13. The effector module of embodiment 12 further comprising a signal peptide, a regulatory sequence, a linker, a label, and/or a protein cleavage site.
[1499] 14. The effector module of embodiment 13, wherein the effector module comprises a protein cleavage site and said protein cleavage site is a furin cleavage site, or a modified a furin cleavage site.
[1500] 15. The effector module of embodiment 10 or 11, wherein the hDHFR-derived SRE of the effector module exhibits both: (a) a destabilization ratio between 0, and 0.09, wherein the destabilization ratio comprises the ratio of expression, function or level of the payload in the absence of the stimulus specific to the hDHFR-derived SRE to the expression, function or level of the payload that is expressed constitutively in the absence of the same stimulus, and (b) a destabilizing mutation co-efficient between 0 and 0.09, wherein the destabilizing mutation co-efficient comprises the ratio of expression, function or level of the payload when operably linked to the hDHFR-derived SRE, in the absence of the stimulus specific to the hDHFR-derived SRE; to the expression, function or level of the payload when operably linked to the wildtype protein from which the hDHFR-derived SRE is derived and in the absence of the same stimulus.
[1501] 16. The effector module of embodiment 15, wherein the hDHFR-derived SRE stabilizes the payload by a stabilization ratio of 1 or more, wherein the stabilization ratio comprises the ratio of expression, function or level of the payload in the presence of the stimulus to the expression, function or level of the payload in the absence of the stimulus.
[1502] 17. The effector module of embodiment 15 or 16, wherein the payload is a protein of interest.
[1503] 18. A vector comprising a nucleic acid sequence independently selected from any of SEQ ID NOs. 6625-6668, or 419-422, 4358 and 2739.
[1504] 19. The vector of embodiment 18, wherein the vector is a viral vector selected from a retroviral vector, a lentiviral vector, a rAAV vector, and an oncolytic viral vector.
[1505] 20. A method of tuning the expression level and/or activity of a protein of interest comprising appending or attaching to said protein of interest a hDHFR mutant comprising one, two, three or more mutations selected from M1del, V2A, C7R, I8V, V9A, A10T, A10V, Q13R, N14S, G16S, I17N, I17V, K19E, N20D, G21T, G21E, D22S, L23S, P24S, L28P, N30D, N30H, N30S, E31G, E31D, F32M, R33G, R33S, F35L, Q36R, Q36S, Q36K, Q36F, R37G, M38V, M38T, T40A, V44A, K47R, N49S, N49D, M53T, G54R, K56E, K56R, T57A, F59S, I61T, K64R, N65A, N65S, N65D, N65F, L68S, K69E, K69R, R71G, I72T, I72A, I72V, N73G, L74N, V75F, R78G, L80P, K81R, E82G, H88Y, F89L, R92G, S93G, S93R, L94A, D96G, A97T, L98S, K99G, K99R, L100P, E102G, Q103R, P104S, E105G, A107T, A107V, N108D, K109E, K109R, V110A, D111N, M112T, M112V, V113A, W114R, I115V, I115L, V116I, G117D, V121A, Y122C, Y122D, Y122I, K123R, K123E, A125F, M126I, N127R, N127S, N127Y, H128R, H128Y, H131R, L132P, K133E, L134P, F135P, F135L, F135S, F135V, V136M, T137R, R138G, R138I, I139T, I139V, M140I, M140V, Q141R, D142G, F143S, F143L, E144G, D146G, T147A, F148S, F148L, F149L, P150L, E151G, I152V, D153A, D153G, E155G, K156R, Y157R, Y157C, K158E, K158R, L159P, L160P, E162G, Y163C, V166A, S168C, D169G, V170A, Q171R, E172G, E173G, E173A, K174R, I176A, I176F, I176T, K177E, K177R, Y178C, Y178H, F180L, E181G, V182A, Y183C, Y183H, E184R, E184G, K185R, K185del, K185E, N186S, N186D, D187G, and D187N.

[1506] In a further aspect, the biocircuits, stimulus response elements, compositions and methods are discussed further in the following embodiments.
[1507] 1. A composition for inducing an immune response in a cell or a subject comprising a first effector module, said effector module comprising a first stimulus response element (SRE) operably linked to at least one immunotherapeutic agent.
[1508] 2. The composition of embodiment 1, wherein said at least one immunotherapeutic agent is selected from a chimeric antigen receptor (CAR) and an antibody.
[1509] 3. The composition of embodiment 2, wherein said first SRE is responsive to or interacts with at least one stimulus.
[1510] 4. The composition of embodiment 3, wherein said first SRE is a destabilizing domain (DD).
[1511] 5. The composition of embodiment 4, wherein the DD is derived from a parent protein or a mutant protein having one, two, three or more amino acid mutations compared to said parent protein, wherein the parent protein is selected from: (a) human protein FKBP comprising the amino acid sequence of SEQ ID NO. 6774, (b) human DHFR (hDHFR) comprising the amino acid sequence of SEQ ID NO. 6775, (c) E. coli DHFR (ecDHFR) comprising the amino acid sequence of SEQ ID NO. 6776, (d) PDE5 comprising the amino acid sequence of SEQ ID NO. 6777, (e) PPAR gamma comprising the amino acid sequence of SEQ ID NO. 6778, (f) CA2 comprising the amino acid sequence of SEQ ID NO. 6779, and (g) NQO2 comprising the amino acid sequence of SEQ ID NO. 6780.
[1512] 6. The composition of embodiment 5, wherein the parent protein is hDHFR and the DD comprises a mutant protein having: (a) a single mutation selected from hDHFR (I17V), hDHFR (F59S), hDHFR (N65D), hDHFR (K81R), hDHFR (A107V), hDHFR (Y122I), hDHFR (N127Y), hDHFR (M140I), hDHFR (K185E), hDHFR (N186D), hDHFR (M140I), hDHFR (Amino acid 2-187 of WT; N127Y), hDHFR (Amino acid 2-187 of WT; I17V), hDHFR (Amino acid 2-187 of WT; Y122I), and hDHFR (Amino acid 2-187 of WT; K185E); (b) a double mutation selected from hDHFR (C7R, Y163C), hDHFR (A10V, H88Y), hDHFR (Q36K, Y122I), hDHFR (M53T, R138I), hDHFR (T57A, I72A), hDHFR (E63G, I176F), hDHFR (G21T, Y122I), hDHFR (L74N, Y122I), hDHFR (V75F, Y122I), hDHFR (L94A, T147A), DHFR (V121A, Y22I), hDHFR (Y122I, A125F), hDHFR (H131R, E144G), hDHFR (T137R, F143L), hDHFR (Y178H, E18IG), hDHFR (Y183H, K185E), hDHFR (E162G, I176F) hDHFR (Amino acid 2-187 of WT; I17V, Y122I), hDHFR (Amino acid 2-187 of WT; Y122I, M140I), hDHFR (Amino acid 2-187 of WT; N127Y, Y122I), hDHFR (Amino acid 2-187 of WT; E162G, I176F), and hDHFR (Amino acid 2-187 of WT; H131R, E144G), and hDHFR (Amino acid 2-187 of WT; Y122I, A125F); (c) a triple mutation selected from hDHFR (V9A, S93R, P150L), hDHFR (I8V, K133E, Y163C), hDHFR (L23S, V121A, Y157C), hDHFR (K19E, F89L, E181G), hDHFR (Q36F, N65F, Y122I), hDHFR (G54R, M140V, S168C), hDHFR (V110A, V136M, K177R), hDHFR (Q36F, Y122I, A125F), hDHFR (N49D, F59S, D153G), hDHFR (G21E, I72V, I176T), hDHFR (Amino acid 2-187 of WT; Q36F, Y122I, A125F), hDHFR (Amino acid 2-187 of WT; Y122I, H131R, E144G), hDHFR (Amino acid 2-187 of WT; E31D, F32M, V116I), and hDHFR (Amino acid 2-187 of WT; Q36F, N65F, Y122I); or (d) a quadruple or higher mutation selected from hDHFR (V2A, R33G, Q36R, L100P, K185R), hDHFR (Amino acid 2-187 of WT; D22S, F32M, R33S, Q36S, N65S), hDHFR (I17N, L98S, K99R, M112T, E151G, E162G, E172G), hDHFR (G16S, I17V, F89L, D96G, K123E, M140V, D146G, K156R), hDHFR (K81R, K99R, L100P, E102G, N108D, K123R, H128R, D142G, F180L, K185E), hDHFR (R138G, D142G, F143S, K156R, K158E, E162G, V166A, K177E, Y178C, K185E, N186S), hDHFR (N14S, P24S, F35L, M53T, K56E, R92G, S93G, N127S, H128Y, F135L, F143S, L159P, L160P, E173A, F180L), hDHFR (F35L, R37G, N65A, L68S, K69E, R71G, L80P, K99G, G117D, L132P, I139V, M140I, D142G, D146G, E173G, D187G), hDHFR (L28P, N30H, M38V, V44A, L68S, N73G, R78G, A97T, K99R, A107T, K109R, D111N, L134P, F135V, T147A, I152V, K158R, E172G, V182A, E184R), hDHFR (V2A, I17V, N30D, E31G, Q36R, F59S, K69E, I72T, H88Y, F89L, N108D, K109E, V110A, I115V, Y122D, L132P, F135S, M140V, E144G, T147A, Y157C, V170A, K174R, N186S), hDHFR (L100P, E102G, Q103R, P104S, E105G, N108D, V113A, W114R, Y122C, M126I, N127R, H128Y, L132P, F135P, 1139T, F148S, F149L, 1152V, D153A, D169G, V170A, 1176A, K177R, V182A, K185R, N186S), and hDHFR (A10T, Q13R, N14S, N20D, P24S, N30S, M38T, T40A, K47R, N49S, K56R, I61T, K64R, K69R, I72A, R78G, E82G, F89L, D96G, N108D, M112V, W114R, Y122D, K123E, I139V, Q141R, D142G, F148L, E151G, E155G, Y157R, Q171R, Y183C, E184G, K185del, D187N).
[1513] 7. The composition of embodiment 6, wherein the stimulus is selected from the group consisting of Trimethoprim (TMP) and Methotrexate (MTX).
[1514] 8. The composition of embodiment 2, wherein the immunotherapeutic agent is a chimeric antigen receptor (CAR).
[1515] 9. The composition of embodiment 8, wherein the chimeric antigen receptor (CAR) comprises (a) an extracellular target moiety; (b) a transmembrane domain; (c) an intracellular signaling domain; and (d) optionally, one or more co-stimulatory domains.
[1516] 10. The composition of embodiment 9, wherein the CAR is a standard CAR, a split CAR, an off-switch CAR, an on-switch CAR, a first-generation CAR, a second-generation CAR, a third-generation CAR, or a fourth-generation CAR.
[1517] 11. The composition of embodiment 9, wherein the extracellular target moiety recognizes a target molecule on the surface of a cancer cell, wherein said target molecule on the surface of the cancer cell is selected from a cancer antigen, a plasma membrane lipid, a receptor and a membrane bound glycoprotein.
[1518] 12. The composition of any of embodiments 9-11, wherein the extracellular target moiety is selected from any of:
[1519] i. an Ig NAR,
[1520] ii. a Fab fragment,
[1521] iii. a Fab′ fragment,
[1522] iv. a F(ab)′2 fragment,
[1523] v. a F(ab)′3 fragment,
[1524] vi. an Fv,
[1525] vii. a single chain variable fragment (scFv),
[1526] viii. a bis-scFv, a (scFv)2,
[1527] ix. a minibody,
[1528] x. a diabody,
[1529] xi. a triabody,
[1530] xii. a tetrabody,
[1531] xiii. an intrabody,
[1532] xiv. a disulfide stabilized Fv protein (dsFv),
[1533] xv. a unibody,
[1534] xvi. a nanobody, and
[1535] xvii. an antigen binding region derived from an antibody that specifically binds to any of a protein of interest, a ligand, a receptor, a receptor fragment or a peptide aptamer.
[1536] 13. The composition of embodiment 12, wherein the extracellular target moiety is a scFv derived from an antibody that specifically binds a CD19 antigen.
[1537] 14. The composition of embodiment 13, wherein the scFv is a CD19 scFv is selected from one that comprises: (a) a heavy chain variable region having an amino acid sequence independently selected from the group consisting of SEQ ID NO: 6681-6712, and a light chain variable region having an amino acid sequence independently selected from the group consisting of any of SEQ ID NOs: 81-117, 119-122 and 2738; or (b) an amino acid sequence selected from the group consisting of any of SEQ ID NOs: 6752-6896 and 6897.
[1538] 15. The composition of embodiment 9, wherein (a) the intracellular signaling domain of the CAR is the signaling domain derived from T cell receptor CD3zeta or a cell surface molecule selected from the group consisting of FcR gamma, FcR beta, CD3 gamma, CD3 delta, CD3 epsilon, CD5, CD22, CD79a, CD79b, and CD66d; and (b) the co-stimulatory domain is present and is selected from the group consisting of 2B4, HVEM, ICOS, LAG3, DAP10, DAP12, CD27, CD28, 4-1BB (CD137), OX40 (CD134), CD30, CD40, ICOS (CD278), glucocorticoid-induced tumor necrosis factor receptor (GITR), lymphocyte function-associated antigen-1 (LFA-1), CD2, CD7, LIGHT, NKG2C, and B7-H3.
[1539] 16. The composition of embodiment 15, wherein the intracellular signaling domain of the CAR is a T cell receptor CD3zeta signaling domain comprising the amino acid sequence of SEQ ID NO: 6898.
[1540] 17. The composition of embodiment 9, wherein the intracellular signaling domain of the CAR is a T cell receptor CD3zeta signaling domain comprising the amino acid sequence of SEQ ID NO: 6899 and the co-stimulatory domain is present, said co-stimulatory domain being selected from amino acid sequence of any of SEQ ID NOs: 6900-7006.
[1541] 18. The composition of embodiment 9, wherein the transmembrane domain is derived from any of the members of the group consisting of: (a) a transmembrane region of an alpha, beta or zeta chain of a T-cell receptor; (b) the CD3 epsilon chain of a T-cell receptor; (c) a molecule selected from CD4, CD5, CD8, CD8α, CD9, CD16, CD22, CD33, CD28, CD3γ, CD45, CD64, CD80, CD86, CD148, DAP 10, EpoRI, GITR, LAG3, ICOS, Her2, OX40 (CD134), 4-1BB (CD137), CD152, CD154, PD-1, or CTLA-4; and (d) an immunoglobulin selected from IgG1, IgD, IgG4, and an IgG4Fc region.
[1542] 19. The composition of embodiment 9, wherein the transmembrane domain comprises an amino acid sequence selected from the group consisting of any of SEQ ID NOs: 375-422, 424-425, 2739 and 7055-7065.
[1543] 20. The composition of embodiment 9, wherein the CAR further comprises a hinge region near the transmembrane domain, said hinge region comprising an amino acid sequence selected from the group consisting of any of SEQ ID NOs: 7066-7144.
[1544] 21. The composition of embodiment 2, wherein the immunotherapeutic agent is an antibody that is specifically immunoreactive to an antigen selected from a tumor specific antigen (TSA), a tumor associated antigen (TAA), or an antigenic epitope.
[1545] 22. The composition of embodiment 21, wherein the antigen is an antigenic epitope and said antigenic epitope is CD19.
[1546] 23. The composition of embodiment 22, wherein the antibody is selected from one that comprises: (a) a heavy chain variable region having an amino acid sequence independently selected from the group consisting of any of SEQ ID NOs: 7365-4396 and a light chain variable region having an amino acid sequence independently selected from the group consisting of any of SEQ ID NOs: 81-117, 119-122 and 2738; or (b) an amino acid sequence selected from the group consisting of any of SEQ ID NOs: 6752-6896.
[1547] 24. The composition of embodiment 1 wherein said first effector module comprises the amino acid sequence of any of SEQ ID NO: 7145-7169 and 1214-1230.
[1548] 25. The composition of embodiment 24, wherein said first SRE of the effector module stabilizes the immunotherapeutic agent by a stabilization ratio of 1 or more, wherein the stabilization ratio comprises the ratio of expression, function or level of the immunotherapeutic agent in the presence of the stimulus to the expression, function or level of the immunotherapeutic agent in the absence of the stimulus.
[1549] 26. The composition of any of embodiments 24-25, wherein the SRE destabilizes the immunotherapeutic agent by a destabilization ratio between 0, and 0.09, wherein the destabilization ratio comprises the ratio of expression, function or level of the immunotherapeutic agent in the absence of the stimulus specific to the SRE to the expression, function or level of the immunotherapeutic agent that is expressed constitutively, and in the absence of the stimulus specific to the SRE.
[1550] 27. A polynucleotide encoding any of the compositions of embodiments 1-26.
[1551] 28. The polynucleotide of embodiment 27, wherein the polynucleotide is a DNA molecule, or a RNA molecule.
[1552] 29. The polynucleotide of embodiment 28, wherein the polynucleotide is an RNA molecule and said RNA molecule is a messenger RNA.
[1553] 30. The polynucleotide of embodiment 29, which is chemically modified.
[1554] 31. The polynucleotide of embodiment 28, which comprises spatiotemporally selected codons.
[1555] 32. The polynucleotide of embodiment 29, further encoding a promoter, a linker, a signal peptide, a tag, a cleavage site and/or a targeting peptide.
[1556] 33. A vector comprising a polynucleotide of any of embodiments 27-32.
[1557] 34. The vector of embodiment 33, wherein the vector is a viral vector, or a plasmid.
[1558] 35. The vector of embodiment 34, which is a viral vector and wherein the viral vector is a retroviral vector, a lentiviral vector, a gamma retroviral vector, a recombinant AAV vector, an adeno viral vector, or an oncolytic viral vector.
[1559] 36. An immune cell for adoptive cell transfer (ACT), which expresses any of the compositions of any of embodiments 1-26, the polynucleotides of any of embodiments 27-32, and/or is infected or transfected with the vector of any of embodiments 33-35.
[1560] 37. The immune cell of embodiment 36, wherein the immune cell is a CD8+ T cell, a CD4+ T cell, a helper T cell, a natural killer (NK) cell, a NKT cell, a cytotoxic T lymphocyte (CTL), a tumor infiltrating lymphocyte (TIL), a memory T cell, a regulatory T (Treg) cell, a cytokine-induced killer (CIK) cell, a dendritic cell, a human embryonic stem cell, a mesenchymal stem cell, a hematopoietic stem cell, or a mixture thereof.
[1561] 38. The immune cell of embodiment 36, wherein the immune cell 49 which further expresses a composition comprising a second effector module, said second effector module comprising a second SRE linked to a second immunotherapeutic agent wherein the second immunotherapeutic agent is selected from a cytokine, and a cytokine-cytokine receptor fusion.
[1562] 39. The immune cell of embodiment 38, wherein the second immunotherapeutic agent is a cytokine.
[1563] 40. The immune cell of embodiment 39, wherein the cytokine is IL12 or IL15.
[1564] 41. The immune cell of embodiment 38, wherein the second immunotherapeutic agent is a cytokine-cytokine receptor fusion polypeptide.
[1565] 42. The immune cell of embodiment 41, wherein the cytokine-cytokine receptor fusion polypeptide is selected from a IL12-IL12 receptor fusion polypeptide, a IL15-IL15 receptor fusion polypeptide, and a IL15-IL15 receptor sushi domain fusion polypeptide.
[1566] 43. The immune cell of embodiment 36 or 37, wherein the immune cell is autologous, allogeneic, syngeneic, or xenogeneic in relation to a particular individual subject.
[1567] 44. A method of reducing a tumor volume or burden in a subject, comprising contacting said subject with a composition of any of embodiments 1-26, the polynucleotides of any of embodiments 27-32, the vectors of any of embodiments 33-35 or the immune cells of any of embodiments 36-43, wherein the SRE responds to a stimulus and regulates the expression and function of the immunotherapeutic agent.
[1568] 45. A method of inducing an immune response in a subject comprising administering to the subject an effective amount of any of the compositions of embodiments 1-26, the polynucleotides of any of embodiments 27-32, the vectors of any of embodiments 33-35 or the immune cells of any of embodiments 36-43.
[1569] 46. A method of identifying a domain of a CD19 antigen which will not bind the FMC63 antibody (FMC63-distinct CD19 binding domain), said method comprising: (a) preparing a composition comprising a CD19 antigen, (b) contacting the composition in (a) with saturating levels of FMC63 antibody, (c) contact the composition of step (b) with one or more selected members of a library of potential CD19 binders; and (d) identifying a binding domain on the CD19 antigen based on the differential binding of the selected members of the library of CD19 binders compared to the binding of FMC63.
[1570] 47. The method of embodiment 46, wherein said binding domains of the library are generated using phage display techniques with the CD19 antigen as the seed sequence.
[1571] 48. The method of embodiment 47, wherein the binding domain is selected from a Fab fragment, a Fab′ fragment, a F(ab)′2 fragment, a F(ab)′3 fragment, Fv, a single chain variable fragment (scFv), a bis-scFv, a (scFv)2, a minibody, a diabody, a triabody, a tetrabody, a disulfide stabilized Fv protein (dsFv), a unibody, a nanobody, or an antigen binding region of an antibody, and an antibody fragment.
[1572] 49. The method of embodiment 48, wherein the CD19 antigen is selected from a whole or a portion of a human CD19 antigen, and a whole or a portion of a Rhesus CD19 antigen.
[1573] 50. A chimeric antigen receptor comprising the FMC63-distinct CD19 binding domain obtained according to the method of any of embodiments 46-49.
[1574] 51. An effector module comprising a stimulus response element (SRE) operably lined to the chimeric antigen receptor of embodiment 50.

[1575] In a further aspect, the biocircuits, stimulus response elements, compositions and methods are discussed further in the following embodiments.
[1576] 1. A composition for inducing an immune response in a cell or a subject comprising an effector module, said effector module comprising a stimulus response element (SRE) operably linked to at least one payload, wherein said payload comprises an immunotherapeutic agent.
[1577] 2. The composition of embodiment 1, wherein the immunotherapeutic agent is selected from the group consisting of a cytokine, a cytokine receptor, a cytokine-cytokine receptor fusion, and combinations thereof.
[1578] 3. The composition of embodiment 2, wherein the SRE is responsive to or interacts with at least one stimulus.
[1579] 4. The composition of embodiment 3, wherein the SRE comprises a destabilizing domain (DD).
[1580] 5. The composition of embodiment 4, wherein the DD is derived from a parent protein or a mutant protein having one, two, three or more amino acid mutations compared to said parent protein, wherein the parent protein is selected from: (a) human protein FKBP, comprising the amino acid sequence of SEQ. ID NO. 7170; (b) human DHFR (hDHFR), comprising the amino acid sequence of SEQ. ID NO. 7171; (c) E. Coli DHFR, comprising the amino acid sequence of SEQ. ID NO. 1 (d) PDE5, comprising the amino acid sequence of SEQ. ID NO. 7173; (e) PPAR, gamma comprising the amino acid sequence of SEQ. ID NO. 7174; (f) CA2, comprising the amino acid sequence of SEQ. ID NO. 7175; or (g) NQO2, comprising the amino acid sequence of SEQ. ID NO. 7176.
[1581] 6. The composition of embodiment 5, wherein the parent protein is hDHFR and the DD comprises a mutant protein having: (a) a single mutation selected from hDHFR (I17V), hDHFR (F59S), hDHFR (N65D), hDHFR (K81R), hDHFR (A107V), hDHFR (Y122I), hDHFR (N127Y), hDHFR (M140I), hDHFR (K185E), hDHFR (N186D), hDHFR (M140I), hDHFR (Amino acid 2-187 of WT; N127Y), hDHFR (Amino acid 2-187 of WT; I17V), hDHFR (Amino acid 2-187 of WT; Y122I), and hDHFR (Amino acid 2-187 of WT; K185E); (b) a double mutation selected from hDHFR (C7R, Y163C), hDHFR (A10V, H88Y), hDHFR (Q36K, Y122I), hDHFR (M53T, R138I), hDHFR (T57A, I72A), hDHFR (E63G, I176F), hDHFR (G21T, Y122I), hDHFR (L74N, Y122I), hDHFR (V75F, Y122I), hDHFR (L94A, T147A), DHFR (V121A, Y22I), hDHFR (Y122I, A125F), hDHFR (H131R, E144G), hDHFR (T137R, F143L), hDHFR (Y178H, E18IG), hDHFR (Y183H, K185E), hDHFR (E162G, I176F) hDHFR (Amino acid 2-187 of WT; I17V, Y122I), hDHFR (Amino acid 2-187 of WT; Y122I, M140I), hDHFR (Amino acid 2-187 of WT; N127Y, Y122I), hDHFR (Amino acid 2-187 of WT; E162G, I176F), and hDHFR (Amino acid 2-187 of WT; H131R, E144G), and hDHFR (Amino acid 2-187 of WT; Y122I, A125F); (c) a triple mutation selected from hDHFR (V9A, S93R, P150L), hDHFR (I8V, K133E, Y163C), hDHFR (L23S, V121A, Y157C), hDHFR (K19E, F89L, E181G), hDHFR (Q36F, N65F, Y122I), hDHFR (G54R, M140V, S168C), hDHFR (V110A, V136M, K177R), hDHFR (Q36F, Y122I, A125F), hDHFR (N49D, F59S, D153G), hDHFR (G21E, I72V, I176T), hDHFR (Amino acid 2-187 of WT; Q36F, Y122I, A125F), hDHFR (Amino acid 2-187 of WT; Y122I, H131R, E144G), hDHFR (Amino acid 2-187 of WT; E31D, F32M, V116I), and hDHFR (Amino acid 2-187 of WT; Q36F, N65F, Y122I); or (d) a quadruple or higher mutation selected from hDHFR (V2A, R33G, Q36R, L100P, K185R), hDHFR (Amino acid 2-187 of WT; D22S, F32M, R33S, Q36S, N65S), hDHFR (I17N, L98S, K99R, M112T, E151G, E162G, E172G), hDHFR (G16S, I17V, F89L, D96G, K123E, M140V, D146G, K156R), hDHFR (K81R, K99R, L100P, E102G, N108D, K123R, H128R, D142G, F180L, K185E), hDHFR (R138G, D142G, F143S, K156R, K158E, E162G, V166A, K177E, Y178C, K185E, N186S), hDHFR (N14S, P24S, F35L, M53T, K56E, R92G, S93G, N127S, H128Y, F135L, F143S, L159P, L160P, E173A, F180L), hDHFR (F35L, R37G, N65A, L68S, K69E, R71G, L80P, K99G, G117D, L132P, I139V, M140I, D142G, D146G, E173G, D187G), hDHFR (L28P, N30H, M38V, V44A, L68S, N73G, R78G, A97T, K99R, A107T, K109R, D111N, L134P, F135V, T147A, I152V, K158R, E172G, V182A, E184R), hDHFR (V2A, I17V, N30D, E31G, Q36R, F59S, K69E, I72T, H88Y, F89L, N108D, K109E, V110A, I115V, Y122D, L132P, F135S, M140V, E144G, T147A, Y157C, V170A, K174R, N186S), hDHFR (L100P, E102G, Q103R, P104S, E105G, N108D, V113A, W114R, Y122C, M126I, N127R, H128Y, L132P, F135P, 1139T, F148S, F149L, 1152V, D153A, D169G, V170A, 1176A, K177R, V182A, K185R, N186S), and hDHFR (A10T, Q13R, N14S, N20D, P24S, N30S, M38T, T40A, K47R, N49S, K56R, I61T, K64R, K69R, I72A, R78G, E82G, F89L, D96G, N108D, M112V, W114R, Y122D, K123E, I139V, Q141R, D142G, F148L, E151G, E155G, Y157R, Q171R, Y183C, E184G, K185del, D187N).
[1582] 7. The composition of embodiment 6, wherein the stimulus Trimethoprim (TMP) or Methotrexate (MTX).
[1583] 8. The composition of embodiment 2, wherein the immunotherapeutic agent is a cytokine.
[1584] 9. The composition of embodiment 8, wherein the cytokine is an interleukin, an interferon, a tumor necrosis factor, a transforming growth factor B, a CC chemokine, a CXC chemokine, a CX3C chemokine or a growth factor.
[1585] 10. The composition of embodiment 9, wherein the interleukin is the whole or a portion of IL15 comprising the amino acid sequence of SEQ. ID NO. 7177.
[1586] 11. The composition of embodiment 10, wherein SEQ. ID NO. 7177 is modified.
[1587] 12. The composition of embodiment 11, wherein SEQ. ID NO. 7177 modification comprises: (a) fusing SEQ. ID NO. 7177 to the whole, or a portion, of a transmembrane protein, and (b) optionally, incorporating a hinge domain.
[1588] 13. The composition of embodiment 2, wherein the immunotherapeutic agent is a cytokine-cytokine receptor fusion polypeptide.
[1589] 14. The composition of embodiment 13, wherein the cytokine-cytokine receptor fusion polypeptide comprises the whole or a portion of SEQ. ID NO. 7177, fused to the whole or a portion of any of SEQ. ID NOs. 7178-7185 to produce a IL15-IL15 receptor fusion polypeptide.
[1590] 15. The composition of embodiment 14, wherein the cytokine-cytokine receptor fusion polypeptide is modified.
[1591] 16. The composition of embodiment 15, wherein cytokine-cytokine receptor fusion polypeptide modification comprises: (a) fusing the IL15-IL15 receptor fusion polypeptide to the whole, or a portion, of a transmembrane protein, and (b) optionally, incorporating hinge domain.
[1592] 17. The composition of embodiment 1, wherein the effector module is selected from a IL15-DD comprising the amino acid sequence of either of SEQ. ID NOs. 7186-7189, or 7190 and an IL15/IL15Ra fusion-DD comprising the amino acid sequence of any of SEQ. ID NOs. 7191-7203, 7681, 7204-7219, or 7220.
[1593] 18. The composition of embodiment 17, wherein the SRE stabilizes the immunotherapeutic agent by a stabilization ratio of 1 or more, wherein the stabilization ratio comprises the ratio of expression, function or level of the immunotherapeutic agent in the presence of the stimulus to the expression, function or level of the immunotherapeutic agent in the absence of the stimulus.
[1594] 19. The composition of any of embodiments 17-18, wherein the SRE destabilizes the immunotherapeutic agent by a destabilization ratio between 0, and 0.09, wherein the destabilization ratio comprises the ratio of expression, function or level of an immunotherapeutic agent in the absence of the stimulus specific to the SRE to the expression, function or level of the immunotherapeutic agent that is expressed constitutively, and in the absence of the stimulus specific to the SRE.
[1595] 20. A polynucleotide encoding any of the compositions of embodiments 1-19.
[1596] 21. The polynucleotide of embodiment 20, which is a DNA molecule, or an RNA molecule.
[1597] 22. The polynucleotide of embodiment 21, wherein the polynucleotide comprises spatiotemporally selected codons.
[1598] 23. The polynucleotide of embodiment 21 which is a DNA molecule.
[1599] 24. The polynucleotide of embodiment 21, wherein the polynucleotide is an RNA molecule and said RNA molecule is a messenger RNA.
[1600] 25. The polynucleotide of embodiment 24, wherein the polynucleotide is chemically modified.
[1601] 26. The polynucleotide of embodiment 23 or 24, wherein the polynucleotide further comprises at least one additional feature selected from a promoter, a linker, a signal peptide, a tag, a cleavage site and a targeting peptide.
[1602] 27. A vector comprising a polynucleotide of embodiment 20.
[1603] 28. The vector of embodiment 27, wherein the vector is a viral vector, or a plasmid.
[1604] 29. The vector of embodiment 28, wherein the viral vector is a viral vector selected from the group consisting of a retroviral vector, a lentiviral vector, a gamma retroviral vector, a recombinant AAV vector, an adeno viral vector, and an oncolytic viral vector.
[1605] 30. An immune cell for adoptive cell transfer (ACT) which expresses any of the compositions of any of embodiments 1-19, the polynucleotides of any of embodiments 20-26 and/or is infected or transfected with the vector of any of embodiments 27-29.
[1606] 31. The immune cell of embodiment 30, selected from a CD8+ T cell, a CD4+ T cell, a helper T cell, a natural killer (NK) cell, a NKT cell, a cytotoxic T lymphocyte (CTL), a tumor infiltrating lymphocyte (TIL), a memory T cell, a regulatory T (Treg) cell, a cytokine-induced killer (CIK) cell, a dendritic cell, a human embryonic stem cell, a mesenchymal stem cell, a hematopoietic stem cell, or a mixture thereof.
[1607] 32. The immune cell of embodiment 30, which is autologous, allogeneic, syngeneic, or xenogeneic in relation to a particular individual subject.
[1608] 33. A method of reducing a tumor volume or burden in a subject in need thereof, comprising contacting said subject with the immune cells of any of embodiments 30-32.
[1609] 34. A method of inducing an anti-tumor immune response in a subject comprising administering to the subject an effective amount of the immune cells of any of embodiments 30-32.
[1610] 35. A method of enhancing the expansion and/or survival of immune cells comprising contacting the immune cells with the compositions of any of embodiments 1-19, the polynucleotides of any of embodiments 20-26 and/or the vector of any of embodiments 27-29, wherein the SRE responds to a stimulus and regulates the expression and function of the immunotherapeutic agent, thereby enhancing the expansion and/or survival of the immune cells.
[1611] 36. The method of embodiment 35, wherein the contacted immune cell is selected from a CD8+ T cell, a CD4+ T cell, a helper T cell, a natural killer (NK) cell, a NKT cell, a cytotoxic T lymphocyte (CTL), a tumor infiltrating lymphocyte (TIL), a memory T cell, a regulatory T (Treg) cell, a cytokine-induced killer (CIK) cell, a dendritic cell, a human embryonic stem cell, a mesenchymal stem cell, a hematopoietic stem cell, or a mixture thereof.
[1612] 37. A method of inducing an immune response in a subject comprising administering to the subject an effective amount of any of the compositions of embodiments 1-19, any of the polynucleotides of embodiments 20-26, any of the vectors of embodiments 27-29, or any of the immune cells of embodiments 30-32.

[1613] In a further aspect, the biocircuits, stimulus response elements, compositions and methods are discussed further in the following embodiments.
[1614] 1. A composition for inducing an immune response in a cell or a subject comprising a first effector module, said first effector module comprising a first stimulus response element (SRE) operably linked to a first payload, wherein said first payload comprises an immunotherapeutic agent.
[1615] 2. The composition of embodiment 1, wherein the immunotherapeutic agent is a cytokine.
[1616] 3. The composition of embodiment 2, wherein the first SRE is responsive to or interacts with at least one stimulus.
[1617] 4. The composition of embodiment 3, wherein the first SRE is a first destabilizing domain (DD).
[1618] 5. The composition of embodiment 4, wherein the first DD is derived from a parent protein or a mutant protein having one, two, three or more amino acid mutations compared to said parent protein, wherein the parent protein is selected from: (a) human protein FKBP, comprising the amino acid sequence of SEQ ID NO. 7221; (b) human DHFR (hDHFR), comprising the amino acid sequence of SEQ ID NO. 7222; (c) E. Coli DHFR, comprising the amino acid sequence of SEQ ID NO. 7223; (d) PDE5, comprising the amino acid sequence of SEQ ID NO. 7224; (e) PPAR, gamma comprising the amino acid sequence of SEQ ID NO. 7225; (f) CA2, comprising the amino acid sequence of SEQ ID NO. 7226; or (g) NQO2, comprising the amino acid sequence of SEQ ID NO. 7227.

[1619] The composition of embodiment 5, wherein the parent protein is hDHFR and the first DD comprises a mutant protein having: (a) a single mutation selected from hDHFR (I17V), hDHFR (F59S), hDHFR (N65D), hDHFR (K81R), hDHFR (A107V), hDHFR (Y122I), hDHFR (N127Y), hDHFR (M140I), hDHFR (K185E), hDHFR (N186D), and hDHFR (M140I), hDHFR (Amino acid 2-187 of WT; N127Y), hDHFR (Amino acid 2-187 of WT; I17V), hDHFR (Amino acid 2-187 of WT; Y122I), and hDHFR (Amino acid 2-187 of WT; K185E); (b) a double mutation selected from hDHFR (C7R, Y163C), hDHFR (A10V, H88Y), hDHFR (Q36K, Y122I), hDHFR (M53T, R138I), hDHFR (T57A, I72A), hDHFR (E63G, I176F), hDHFR (G21T, Y122I), hDHFR (L74N, Y122I), hDHFR (V75F, Y122I), hDHFR (L94A, T147A), DHFR (V121A, Y22I), hDHFR (Y122I, A125F), hDHFR (H131R, E144G), hDHFR (T137R, F143L), hDHFR (Y178H, E18IG), and hDHFR (Y183H, K185E), hDHFR (E162G, I176F) hDHFR (Amino acid 2-187 of WT; I17V, Y122I), hDHFR (Amino acid 2-187 of WT; Y122I, M140I), hDHFR (Amino acid 2-187 of WT; N127Y, Y122I), hDHFR (Amino acid 2-187 of WT; E162G, I176F), and hDHFR (Amino acid 2-187 of WT; H131R, E144G), and hDHFR (Amino acid 2-187 of WT; Y122I, A125F); or (c) a triple mutation selected from hDHFR (V9A, S93R, P150L), hDHFR (I8V, K133E, Y163C), hDHFR (L23S, V121A, Y157C), hDHFR (K19E, F89L, E181G), hDHFR (Q36F, N65F, Y122I), hDHFR (G54R, M140V, S168C), hDHFR (V110A, V136M, K177R), hDHFR (Q36F, Y122I, A125F), hDHFR (N49D, F59S, D153G), and hDHFR (G21E, I72V, I176T), hDHFR (Amino acid 2-187 of WT; Q36F, Y122I, A125F), hDHFR (Amino acid 2-187 of WT; Y122I, H131R, E144G), hDHFR (Amino acid 2-187 of WT; E31D, F32M, V116I), and hDHFR (Amino acid 2-187 of WT; Q36F, N65F, Y122I); or (d) a quadruple or higher mutation selected from hDHFR (V2A, R33G, Q36R, L100P, K185R), hDHFR (Amino acid 2-187 of WT; D22S, F32M, R33S, Q36S, N65S), hDHFR (I17N, L98S, K99R, M112T, E151G, E162G, E172G), hDHFR (G16S, I17V, F89L, D96G, K123E, M140V, D146G, K156R), hDHFR (K81R, K99R, L100P, E102G, N108D, K123R, H128R, D142G, F180L, K185E), hDHFR (R138G, D142G, F143S, K156R, K158E, E162G, V166A, K177E, Y178C, K185E, N186S), hDHFR (N14S, P24S, F35L, M53T, K56E, R92G, S93G, N127S, H128Y, F135L, F143S, L159P, L160P, E173A, F180L), hDHFR (F35L, R37G, N65A, L68S, K69E, R71G, L80P, K99G, G117D, L132P, I139V, M140I, D142G, D146G, E173G, D187G), hDHFR (L28P, N30H, M38V, V44A, L68S, N73G, R78G, A97T, K99R, A107T, K109R, D111N, L134P, F135V, T147A, I152V, K158R, E172G, V182A, E184R), hDHFR (V2A, I17V, N30D, E31G, Q36R, F59S, K69E, I72T, H88Y, F89L, N108D, K109E, V110A, I115V, Y122D, L132P, F135S, M140V, E144G, T147A, Y157C, V170A, K174R, N186S), hDHFR (L100P, E102G, Q103R, P104S, E105G, N108D, V113A, W114R, Y122C, M126I, N127R, H128Y, L132P, F135P, 1139T, F148S, F149L, 1152V, D153A, D169G, V170A, 1176A, K177R, V182A, K185R, N186S), and hDHFR (A10T, Q13R, N14S, N20D, P24S, N30S, M38T, T40A, K47R, N49S, K56R, I61T, K64R, K69R, I72A, R78G, E82G, F89L, D96G, N108D, M112V, W114R, Y122D, K123E, I139V, Q141R, D142G, F148L, E151G, E155G, Y157R, Q171R, Y183C, E184G, K185del, D187N).
[1620] 7. The composition of embodiment 6, wherein the stimulus is selected from Trimethoprim (TMP) and Methotrexate (MTX).
[1621] 8. The composition of embodiment 2, wherein the cytokine is an interleukin, an interferon, a tumor necrosis factor, a transforming growth factor B, a CC chemokine, a CXC chemokine, a CX3C chemokine or a growth factor.
[1622] 9. The composition of embodiment 8, wherein the interleukin is selected from IL1, IL1-alpha, IL1-beta, IL1-delta, IL1-epsilon, IL1-eta, IL1-zeta, ILRA, IL2, IL3, IL4, IL5, IL6, IL7, IL8, IL9, IL10, IL10C, IL10D, IL11a, IL11b, IL12, IL13, IL14, IL15, IL16, IL17, IL17A, IL17B, IL17C, IL17E, IL17F, IL18, IL19, IL20, IL20L, IL21, IL22, IL23, IL23A, IL24, IL25, IL26, IL27, IL28, IL29, IL30, IL31, IL32, IL33, IL34, IL36a, IL36β, IL367, IL36RN, IL37, IL37a, IL37b, IL37c, 1137d, IL37e, and IL38.
[1623] 10. The composition of embodiment 9, wherein the interleukin is the whole or a portion of IL12.
[1624] 11. The composition of embodiment 10, wherein the IL12 comprises a p40 subunit of SEQ ID NO. 7228, appended to a p35 subunit of SEQ ID NO. 7229.
[1625] 12. The composition of any of embodiments 1-11, wherein said first effector module comprises the amino acid sequence of any of SEQ ID NO. 7230-7238 and 7239.
[1626] 13. The composition of any of embodiments 1-12, further comprising a second effector module, said second effector module comprising a second SRE linked to an immunotherapeutic agent.
[1627] 14. The composition of embodiment 13, wherein the immunotherapeutic agent is a cytokine selected from an IL15 and an IL15/IL15Ra fusion polypeptide.
[1628] 15. The composition of any of embodiments 1-14, wherein said first SRE stabilizes the immunotherapeutic agent by a stabilization ratio of 1 or more, wherein the stabilization ratio comprises the ratio of expression, function or level of the immunotherapeutic agent in the presence of the stimulus to the expression, function or level of the immunotherapeutic agent in the absence of the stimulus.
[1629] 16. The composition of any of embodiments 1-14, wherein said first SRE destabilizes the immunotherapeutic agent by a destabilization ratio between 0, and 0.09, wherein the destabilization ratio comprises the ratio of expression, function or level of the immunotherapeutic agent in the absence of the stimulus specific to said first SRE to the expression, function or level of the immunotherapeutic agent that is expressed constitutively, and in the absence of the stimulus specific to sad first SRE.
[1630] 17. A polynucleotide encoding either or both of said first and said second effector modules of any of embodiments 1-14.
[1631] 18. The polynucleotide of embodiment 17, which is a DNA molecule, or a RNA molecule.
[1632] 19. The polynucleotide of embodiment 18, wherein the polynucleotide is an RNA molecule and said RNA molecule is a messenger RNA.
[1633] 20. The polynucleotide of embodiment 19, wherein the polynucleotide is chemically modified.
[1634] 21. The polynucleotide of embodiment 18, which is a DNA molecule.
[1635] 22. The polynucleotide of embodiment 18, wherein the polynucleotide comprises spatiotemporally selected codons.
[1636] 23. The polynucleotide of embodiment 18, wherein the polynucleotide further comprises at least one additional feature selected from a promoter, a linker, a signal peptide, a tag, and a targeting peptide.
[1637] 24. A vector comprising a polynucleotide of embodiment 17.
[1638] 25. The vector of embodiment 24, wherein the vector is a viral vector, or a plasmid.
[1639] 26. The vector of embodiment 25, which is a viral vector and said viral vector is a retroviral vector, a lentiviral vector, a gamma retroviral vector, a recombinant AAV vector, an adeno viral vector, or an oncolytic viral vector.
[1640] 27. The vector of embodiment 26, wherein the polynucleotide is optionally placed under the transcriptional control of a promoter.
[1641] 28. The vector of embodiment 27, wherein the promoter is selected from a CMV promoter, an EF1a promoter and a PGK promoter.
[1642] 29. The vector of embodiment 28, wherein the promoter is an EF1a promoter.
[1643] 30. An immune cell for adoptive cell transfer (ACT), which expresses any of the compositions of any of embodiments 1-16, the polynucleotides of any of embodiments 17-23, and/or is infected or transfected with the vector of any of embodiments 24-29.
[1644] 31. The immune cell of embodiment 29, selected from a CD8+ T cell, a CD4+ T cell, a helper T cell, a natural killer (NK) cell, a NKT cell, a cytotoxic T lymphocyte (CTL), a tumor infiltrating lymphocyte (TIL), a memory T cell, a regulatory T (Treg) cell, a cytokine-induced killer (CIK) cell, a dendritic cell, a human embryonic stem cell, a mesenchymal stem cell, a hematopoietic stem cell, or a mixture thereof.
[1645] 32. The immune cell of embodiment 31, which is autologous, allogeneic, syngeneic, or xenogeneic in relation to a particular individual subject.
[1646] 33. A method of reducing a tumor volume or burden in a subject in need thereof, comprising contacting said subject with the immune cells of any of embodiments 30-32.
[1647] 34. A method of inducing an anti-tumor immune response in a subject comprising contacting said subject with the immune cells of any of embodiments 30-32.
[1648] 35. The method of embodiment 34, wherein the immune cell is selected from a CD8+ T cell, a CD4+ T cell, a helper T cell, a natural killer (NK) cell, a NKT cell, a cytotoxic T lymphocyte (CTL), a tumor infiltrating lymphocyte (TIL), a memory T cell, a regulatory T (Treg) cell, a cytokine-induced killer (CIK) cell, a dendritic cell, a human embryonic stem cell, a mesenchymal stem cell, a hematopoietic stem cell, or a mixture thereof.
[1649] 36. A method of inducing an immune response in a subject comprising administering to the subject an effective amount of any of the compositions of embodiments 1-16, the polynucleotides of any of embodiments 17-23, the vectors of any of embodiments 24-29, or any of the cells of embodiments 30-32.
[1650] 37. A method for pulsatile regulation of an immunotherapeutic agent in a cell or a subject comprising the steps of

[1651] (a) contacting the cell or subject with an effective amount of the composition of any of embodiments 1-16, wherein said first SRE responds to a stimulus and regulates the expression and function of the immunotherapeutic agent; and

[1652] (b) administering the stimulus to the cell or subject, followed by the withdrawal of the stimulus at selected time intervals, thereby achieving pulsatile regulation of the immunotherapeutic agent.

[1653] In a further aspect, the biocircuits, stimulus response elements, compositions and methods are discussed further in the following embodiments.
[1654] 1. A composition for inducing an immune response in a cell or a subject comprising a first effector module, said effector module comprising a first stimulus response element (SRE) operably linked to at least one immunotherapeutic agent, wherein said at least one immunotherapeutic agent is selected from a cytokine, a safety switch, a regulatory switch, a chimeric antigen receptor and combinations thereof.
[1655] 2. The composition of embodiment 1, wherein said first SRE is responsive to or interacts with at least one stimulus.
[1656] 3. The composition of embodiment 2, wherein said first SRE is a destabilizing domain (DD).
[1657] 4. The composition of embodiment 3, wherein the DD is derived from a parent protein or a mutant protein having one, two, three or more amino acid mutations compared to said parent protein, wherein the parent protein is selected from:
[1658] (a) human protein FKBP comprising the amino acid sequence of SEQ ID NO. 7240,
[1659] (b) human DHFR (hDHFR) comprising the amino acid sequence of SEQ ID NO. 7241,
[1660] (c) E. coli DHFR (ecDHFR) comprising the amino acid sequence of SEQ ID NO. 7242,
[1661] (d) PDE5 comprising the amino acid sequence of SEQ ID NO. 7243,
[1662] (e) PPAR gamma comprising the amino acid sequence of SEQ ID NO. 7244,
[1663] (f) CA2 comprising the amino acid sequence of SEQ ID NO. 7245,
[1664] (g) NQO2 comprising the amino acid sequence of SEQ ID NO. 7246, and
[1665] (h) human DPPIV comprising the amino acid sequence of SEQ ID NO. 7247.
[1666] 5. The composition of embodiment 4, wherein the parent protein is hDHFR and the DD comprises a mutant protein having at least one mutation selected from M1del, V2A, C7R, I8V, V9A, A10T, A10V, Q13R, N14S, G16S, I17N, I17V, K19E, N20D, G21T, G21E, D22S, L23S, P24S, L28P, N30D, N30H, N30S, E31G, E31D, F32M, R33G, R33S, F35L, Q36R, Q36S, Q36K, Q36F, R37G, M38V, M38T, T40A, V44A, K47R, N49S, N49D, M53T, G54R, K56E, K56R, T57A, F59S, I61T, K64R, N65A, N65S, N65D, N65F, L68S, K69E, K69R, R71G, I72T, I72A, I72V, N73G, L74N, V75F, R78G, L80P, K81R, E82G, H88Y, F89L, R92G, S93G, S93R, L94A, D96G, A97T, L98S, K99G, K99R, L100P, E102G, Q103R, P104S, E105G, A107T, A107V, N108D, K109E, K109R, V110A, D111N, M112T, M112V, V113A, W114R, I115V, V116I, G117D, V121A, Y122C, Y122D, Y122I, K123R, K123E, A125F, M126I, N127R, N127S, N127Y, H128R, H128Y, H131R, L132P, K133E, L134P, F135P, F135L, F135S, F135V, V136M, T137R, R138G, R138I, I139T, I139V, M140I, M140V, Q141R, D142G, F143S, F143L, E144G, D146G, T147A, F148S, F148L, F149L, P150L, E151G, I152V, D153A, D153G, E155G, K156R, Y157R, Y157C, K158E, K158R, L159P, L160P, E162G, Y163C, V166A, S168C, D169G, V170A, Q171R, E172G, E173G, E173A, K174R, I176A, I176F, I176T, K177E, K177R, Y178C, Y178H, F180L, E181G, V182A, Y183C, Y183H, E184R, E184G, K185R, K185del, K185E, N186S, N186D, D187G, and D187N.
[1667] 6. The composition of embodiment 5, wherein the stimulus is selected from Trimethoprim (TMP) and Methotrexate (MTX).
[1668] 7. The composition of embodiment 1, wherein the immunotherapeutic agent is a cytokine.
[1669] 8. The composition of embodiment 7, wherein the cytokine is an interleukin, an interferon, a tumor necrosis factor, a transforming growth factor B, a CC chemokine, a CXC chemokine, a CX3C chemokine or a growth factor.
[1670] 9. The composition of embodiment 8, wherein the cytokine is an interleukin and the interleukin is selected from a group consisting of IL1, I-alpha, I-beta, I-delta, I-epsilon, IL1-eta, I-zeta, IL-RA, IL2, IL3, IL4, IL5, IL6, IL7, IL8, IL9, IL10, IL10C, IL10D, IL11a, IL11b, IL13, IL14, IL16, IL17, IL-17A, IL17B, IL17C, IL17E, IL17F, IL18, IL19, IL20, IL20L, IL21, IL22, IL23, IL23A, IL24, IL25, IL26, IL27, IL28, IL29, IL30, IL31, IL32, IL33, IL34, IL36α, IL36β, IL36γ, IL36RN, IL37, IL37a, IL37b, IL37c, 1137d, IL37e, and IL38.
[1671] 10. The composition of embodiment 9, wherein the interleukin is IL2, comprising the amino acid sequence of SEQ ID NO. 7248.
[1672] 11. The composition of embodiment 1, wherein the immunotherapeutic agent is a safety switch.
[1673] 12. The composition of embodiment 11, wherein the safety switch is selected from a Caspase 9, an inducible FAS (iFAS), an inducible caspase 9 (icasp9), a CD20/anti-CD20 antibody pair, a protein tag/anti-tag antibody, and a compact suicide gene (RQR8).
[1674] 13. The composition of embodiment 12, wherein the safety switch is a Caspase 9 comprising the amino acid sequence of SEQ ID NO. 7249.
[1675] 14. The composition of embodiment 1, wherein the immunotherapeutic agent encodes a regulatory switch.
[1676] 15. The composition of embodiment 14, wherein the regulatory switch is selected from a FOXP3, a Nr4a, a FOXO, and a NF-B.
[1677] 16. The composition of embodiment 15, wherein the regulatory switch is a FOXP3, comprising the amino acid sequence of SEQ ID NO. 7250-7253.
[1678] 17. The composition of embodiment 1, wherein the immunotherapeutic agent is a chimeric antigen receptor (CAR) and is selected from a GD2 CAR, a Her2 CAR, a BCMA CAR, a CD33 CAR, an ALK CAR, a CD22 CAR, and a CD276 CAR, each of which comprises an extracellular moiety, a transmembrane domain, an intracellular signaling domain, and optionally, one or more co-stimulatory domains.
[1679] 18. The composition of embodiment 17, wherein the CAR is designed as a standard CAR, a split CAR, an off-switch CAR, an on-switch CAR, a first-generation CAR, a second-generation CAR, a third-generation CAR, or a fourth-generation CAR.
[1680] 19. The composition of embodiment 18, wherein the extracellular target moiety is selected from any of:
[1681] an Ig NAR,
[1682] a Fab fragment,
[1683] a Fab′ fragment,
[1684] a F(ab)′2 fragment,
[1685] a F(ab)′3 fragment,
[1686] an Fv,
[1687] a single chain variable fragment (scFv),
[1688] a bis-scFv, a (scFv)2,
[1689] a minibody,
[1690] a diabody,
[1691] a triabody,
[1692] a tetrabody,
[1693] an intrabody,
[1694] a disulfide stabilized Fv protein (dsFv),
[1695] a unibody,
[1696] a nanobody, and
[1697] an antigen binding region derived from an antibody that specifically binds to any of a protein of interest, a ligand, a receptor, a receptor fragment or a peptide aptamer.
[1698] 20. The composition of embodiment 17, wherein the extracellular target moiety is selected from an ALK target moiety, comprising the amino acid sequence of SEQ ID NO. 7254-7269 and 7270, 424-429 and 2739, a CD22 target moiety, comprising the amino acid sequence of SEQ ID NO. 7276-7280 and 7281-7283, a CD276 target moiety, comprising the amino acid sequence of SEQ ID NO. 7284-7291 and 7292-7295, a GD2 target moiety, comprising the amino acid sequence of SEQ ID NO. 7296-7374 and 7375-7403, a CD33 target moiety, comprising the amino acid sequence of SEQ ID NO. 7404-7411, a BCMA target moiety, comprising the amino acid sequence of SEQ ID NO. 7412-7419, and a Her2 target moiety, comprising the amino acid sequence of SEQ ID NO. 7420-7575 and 7476-7483.
[1699] 21. The composition of embodiment 17, wherein (a) the intracellular signaling domain of the CAR is the signaling domain derived from T cell receptor CD3zeta or a cell surface molecule selected from the group consisting of FcR gamma, FcR beta, CD3 gamma, CD3 delta, CD3 epsilon, CD5, CD22, CD79a, CD79b, and CD66d; and (b) the co-stimulatory domain is present and is selected from the group consisting of 2B4, HVEM, ICOS, LAG3, DAP10, DAP12, CD27, CD28, 4-1BB (CD137), OX40 (CD134), CD30, CD40, ICOS (CD278), glucocorticoid-induced tumor necrosis factor receptor (GITR), lymphocyte function-associated antigen-1 (LFA-1), CD2, CD7, LIGHT, NKG2C, and B7-H3.
[1700] 22. The composition of embodiment 17, wherein the transmembrane domain comprises the amino acid sequence of SEQ ID NO. 7484-7581.
[1701] 23. The composition of embodiment 17, wherein the transmembrane domain further comprises a hinge region comprising the amino acid sequence of SEQ ID NO. 628-633, 635-694 and 2741.
[1702] 24. The composition of any of embodiments 1-23 wherein said first effector module comprises one or more of:
[1703] (a) an IL2-DD, comprising the amino acid sequence of any of SEQ ID NOs. 7646-7648,
[1704] (b) a Caspase 9-DD, comprising the amino acid sequence of any of SEQ ID NOs. 7649-7657,
[1705] (c) a FOXP3-DD, comprising the amino acid sequence of any of SEQ ID NOs. 7658-7667,
[1706] (d) a BCMA CAR-DD, comprising the amino acid sequence of any of SEQ ID NOs. 7668-7670, and
[1707] (e) a HER2-DD, comprising the amino acid sequence of SEQ ID NO. 7671.
[1708] 25. A polynucleotide encoding any of the compositions of embodiments 1-24, wherein said at least one immunotherapeutic agent is selected from a cytokine, a safety switch, a regulatory switch, a chimeric antigen receptor and the combination thereof.
[1709] 26. The polynucleotide of embodiment 25, wherein the polynucleotide is a DNA molecule, or a RNA molecule.
[1710] 27. The polynucleotide of embodiment 26, wherein the polynucleotide is RNA and said RNA is a messenger RNA.
[1711] 28. The polynucleotide of embodiment 27, which is chemically modified.
[1712] 29. The polynucleotide of embodiment 26, which comprises spatiotemporally selected codons.
[1713] 30. The polynucleotide of embodiment 27, wherein the polynucleotide encodes at least one additional feature selected from a promoter, a linker, a signal peptide, a tag, a cleavage site and a targeting peptide.
[1714] 31. The polynucleotide of embodiment 25, wherein the chimeric antigen receptor is selected from a GD2 CAR, a Her2 CAR, a BCMA CAR, a CD33 CAR, an ALK CAR, CD22 CAR, and a CD276 CAR.
[1715] 32. A vector comprising a polynucleotide of any of embodiments 25-31 wherein said at least one immunotherapeutic agent is selected from a cytokine, a safety switch, a regulatory switch, a chimeric antigen receptor and the combination thereof.
[1716] 33. The vector of embodiment 32, wherein the vector is a viral vector, or a plasmid.
[1717] 34. The vector of embodiment 33, wherein the vector is a viral vector and said viral vector is a retroviral vector, a lentiviral vector, a gamma retroviral vector, a recombinant AAV vector, an adeno viral vector, or an oncolytic viral vector.
[1718] 35. The vector of embodiment 34, wherein the polynucleotide encodes any of the compositions of embodiment 1-24.
[1719] 36. An immune cell for adoptive cell transfer (ACT), which expresses any of the compositions of any of embodiments 1-24, the polynucleotides of any of embodiments 25-31, and/or is infected or transfected with the vector of any of embodiments 32-35.
[1720] 37. The immune cell of embodiment 36, wherein the immune cell is a CD8+ T cell, a CD4+ T cell, a helper T cell, a natural killer (NK) cell, a NKT cell, a cytotoxic T lymphocyte (CTL), a tumor infiltrating lymphocyte (TIL), a memory T cell, a regulatory T (Treg) cell, a cytokine-induced killer (CIK) cell, a dendritic cell, a human embryonic stem cell, a mesenchymal stem cell, a hematopoietic stem cell, or a mixture thereof.
[1721] 38. The immune cell of embodiment 36, wherein the SRE is a destabilizing domain DD, wherein the DD is derived from human protein FKBP comprising the amino acid sequence of SEQ ID NO. 7672, DHFR comprising the amino acid sequence of SEQ ID NO. 7673, 7674, PDE5 comprising the amino acid sequence of SEQ ID NO. 7675, PPAR gamma comprising the amino acid sequence of SEQ ID NO. 7676, CA2 comprising the amino acid sequence of SEQ ID NO. 7677 and NQO2 comprising the amino acid sequence of SEQ ID NO. 7678.
[1722] 39. The immune cell of embodiment 38, wherein the DD is derived from a parent protein and the parent protein is hDHFR and the DD comprises a mutant protein having at least one mutation selected from M1del, V2A, C7R, I8V, V9A, A10T, A10V, Q13R, N14S, G16S, I17N, I17V, K19E, N20D, G21T, G21E, D22S, L23S, P24S, L28P, N30D, N30H, N30S, E31G, E31D, F32M, R33G, R33S, F35L, Q36R, Q36S, Q36K, Q36F, R37G, M38V, M38T, T40A, V44A, K47R, N49S, N49D, M53T, G54R, K56E, K56R, T57A, F59S, I61T, K64R, N65A, N65S, N65D, N65F, L68S, K69E, K69R, R71G, I72T, I72A, I72V, N73G, L74N, V75F, R78G, L80P, K81R, E82G, H88Y, F89L, R92G, S93G, S93R, L94A, D96G, A97T, L98S, K99G, K99R, L100P, E102G, Q103R, P104S, E105G, A107T, A107V, N108D, K109E, K109R, V110A, D111N, M112T, M112V, V113A, W114R, I115V, V116I, G117D, V121A, Y122C, Y122D, Y122I, K123R, K123E, A125F, M126I, N127R, N127S, N127Y, H128R, H128Y, H131R, L132P, K133E, L134P, F135P, F135L, F135S, F135V, V136M, T137R, R138G, R138I, I139T, I139V, M140I, M140V, Q141R, D142G, F143S, F143L, E144G, D146G, T147A, F148S, F148L, F149L, P150L, E151G, I152V, D153A, D153G, E155G, K156R, Y157R, Y157C, K158E, K158R, L159P, L160P, E162G, Y163C, V166A, S168C, D169G, V170A, Q171R, E172G, E173G, E173A, K174R, I176A, I176F, I176T, K177E, K177R, Y178C, Y178H, F180L, E181G, V182A, Y183C, Y183H, E184R, E184G, K185R, K185del, K185E, N186S, N186D, D187G, and D187N.
[1723] 40. The immune cell of embodiment 39, which is autologous, allogeneic, syngeneic, or xenogeneic in relation to a particular individual subject.
[1724] 41. A method of reducing a tumor volume or burden in a subject comprising contacting the subject with compositions of any of embodiments 1-24, the polynucleotides of any of embodiments 25-31, the vector of any of embodiments 32-35 or the immune cells of any of embodiments 36-40.
[1725] 42. A method of providing an anti-tumor immune response in a subject comprising administering to the subject an effective amount of the compositions of any of embodiments 1-24, the polynucleotides of any of embodiments 25-31, the vector of any of embodiments 32-35 or the immune cells of any of embodiments 36-40.
[1726] 43. A method of inducing an immune response in a subject comprising administering to the subject an effective amount of any of the compositions of embodiments 1-24, the polynucleotides of any of embodiments 25-31, the vector of any of embodiments 32-35 or the immune cells of any of embodiments 36-40.
[1727] 44. A method of preventing or reversing T cell exhaustion in a subject in need thereof, the method comprising administering to the subject, a therapeutically effective amount of compositions of any of embodiments 1-24, the polynucleotides of any of embodiments 25-31, the vector of any of embodiments 32-35 or the immune cells of any of embodiments 36-40, wherein the SRE responds to a stimulus and tunes the expression and/or function of the immunotherapeutic agent, thereby preventing or reversing T cell exhaustion.
[1728] 45. The method of embodiment 44, wherein the immunotherapeutic agent is a chimeric antigen receptor.
[1729] 46. The method of embodiment 45, wherein the chimeric antigen receptor is a GD2 CAR, BCMA CAR, CD33 CAR, Her2 CAR, ALK CAR, CD22 CAR, or a CD276 CAR.
[1730] 47. A method of detecting the presence of cancer in a mammal, comprising the steps of:
[1731] (a) contacting a sample comprising one or more cells from the mammal with the compositions of any of embodiments 1-24, the polynucleotides of any of embodiments 25-31, the vector of any of embodiments 32-35 or the immune cells of any of embodiments 36-40 and
[1732] (b) detecting the complex, wherein the detection of the complex is indicative of the presence of cancer in the mammal.

[1733] While the present invention has been described at some length and with some particularity with respect to the several described embodiments, it is not intended that it should be limited to any such particulars or embodiments or any particular embodiment, but it is to be construed with references to the appended claims so as to provide the broadest possible interpretation of such claims in view of the prior art and, therefore, to effectively encompass the intended scope of the invention.

[1734] All publications, patent applications, patents, and other references mentioned herein are incorporated by reference in their entirety. In case of conflict, the present specification, including definitions, will control. In addition, section headings, the materials, methods, and examples are illustrative only and not intended to be limiting.

1. A method of treating cancer in a subject, comprising administering to the subject T-cells engineered to express a fusion polypeptide comprising membrane-bound IL15 and a destabilizing domain, wherein the destabilizing domain comprises human carbonic anhydrase II (CA2) comprising the amino acid sequence of SEQ ID NO. 197 or a region thereof and one, two, or three mutations relative to the amino acid sequence of SEQ ID NO. 197, wherein administration thereby treats the cancer in the subject.

2. The method of claim 1, wherein the region of CA2 comprises amino acids 2 to 260 of SEQ ID NO. 197.

3. The method of claim 1, wherein the region of CA2 comprises amino acids 1 to 260 of SEQ ID NO. 197.

4. The method of claim 1, wherein the destabilizing domain is responsive to a ligand.

5. The method of claim 4, further comprising administering to the subject the ligand.

6. The method of claim 5, wherein the ligand is Acetazolamide.

7. The method of claim 5, wherein the ligand is Celecoxib.

8. The method of claim 1, wherein the T-cells are autologous to the subject.

9. The method of claim 1, wherein the T-cells are allogeneic to the subject.

10. The method of claim 1, wherein the membrane-bound IL15 comprises all or a portion of SEQ ID NO: 718.

11. The method of claim 1, wherein the membrane-bound IL15 comprises one or more mutations of SEQ ID NO: 718 and maintains one or more functions of full-length membrane-bound IL15.

12. The method of claim 1, wherein the one or more functions of the full-length membrane-bound IL15 are selected from the group consisting of promotion of natural killer (NK) cell survival; regulation of NK cell and T-cell activation; and proliferation of NK cell development from hematopoietic stem cells.

13. The method of claim 1, wherein the membrane-bound IL15 further comprises a transmembrane domain.

14. The method of claim 13, wherein the transmembrane domain is a CD8α transmembrane domain, a CD4 transmembrane domain, a CD 28 transmembrane domain, a CTLA-4 transmembrane domain, a PD-1 transmembrane domain, or a human IgG4 Fc region.

15. The method of claim 1, further comprising administering to the subject a second anti-cancer therapy in combination with the T-cells.

16. The method of claim 15, wherein the second anti-cancer therapy is radiation therapy.

17. The method of claim 15, wherein the second anti-cancer therapy is chemotherapy.

18. The method of claim 15, wherein the second anti-cancer therapy is a checkpoint inhibitor.

19. The method of claim 19, wherein the checkpoint inhibitor is PD-1.

20. The method of claim 15, wherein the second anti-cancer therapy is a monoclonal antibody.

The application's sequence listing, which the Patent Office published only in electronic form, follows.

SEQUENCE LISTING (7681 sequences)

SEQ ID NO: 1 - protein, 187 aa, Homo sapiens
MVGSLNCIVAVSQNMGIGKNGDLPWPPLRNEFRYFQRMTTTSSVEGKQNLVIMGKKTWFSIPEKNRPLKGRINLVLSRELKEPPQGAHFLSRSLDDALKLTEQPELANKVDMVWIVGGSSVYKEAMNHPGHLKLFVTRIMQDFESDTFFPEIDLEKYKLLPEYPGVLSDVQEEKGIKYKFEVYEKND

SEQ ID NO: 2 - protein, 187 aa, synthetic construct
  REGION 1..187: note = Description of Artificial Sequence: Synthetic destabilizing domain (DD)
MVGSLNCIVAVSQNMGIGKNGDLPWPPLRNEFRYFQRMTTTSSVEGKQNLVIMGKKTWFSIPEKNRPLKGRINLVLSRELKEPPQGAHFLSRSLDDALKLTEQPELVNKVDMVWIVGGSSVYKEAMNHPGHLKLFVTRIMQDFESDTFFPEIDLEKYKLLPEYPGVLSDVQEEKGIKYKFEVYEKND

SEQ ID NO: 3 - protein, 187 aa, synthetic construct
  REGION 1..187: note = Description of Artificial Sequence: Synthetic destabilizing domain (DD)
MVGSLNCIVAVSQNMGIGKNGDLPWPPLRNEFRYFQRMTTTSSVEGKQNLVIMGKKTWSSIPEKNRPLKGRINLVLSRELKEPPQGAHFLSRSLDDALKLTEQPELANKVDMVWIVGGSSVYKEAMNHPGHLKLFVTRIMQDFESDTFFPEIDLEKYKLLPEYPGVLSDVQEEKGIKYKFEVYEKND

SEQ ID NO: 4 - protein, 187 aa, synthetic construct
  REGION 1..187: note = Description of Artificial Sequence: Synthetic destabilizing domain (DD)
MVGSLNCIVAVSQNMGVGKNGDLPWPPLRNEFRYFQRMTTTSSVEGKQNLVIMGKKTWFSIPEKNRPLKGRINLVLSRELKEPPQGAHFLSRSLDDALKLTEQPELANKVDMVWIVGGSSVYKEAMNHPGHLKLFVTRIMQDFESDTFFPEIDLEKYKLLPEYPGVLSDVQEEKGIKYKFEVYEKND

SEQ ID NO: 5 - protein, 187 aa, synthetic construct
  REGION 1..187: note = Description of Artificial Sequence: Synthetic destabilizing domain (DD)
MVGSLNCIVAVSQNMGIGKNGDLPWPPLRNEFRYFQRMTTTSSVEGKQNLVIMGKKTWFSIPEKNRPLKGRINLVLSRELKEPPQGAHFLSRSLDDALKLTEQPELANKVDMVWIVGGSSVYKEAMNHPGHLKLFVTRIMQDFESDTFFPEIDLEKYKLLPEYPGVLSDVQEEKGIKYKFEVYEEND

SEQ ID NO: 6 - protein, 187 aa, synthetic construct
  REGION 1..187: note = Description of Artificial Sequence: Synthetic destabilizing domain (DD)
MVGSLNCIVAVSQNMGIGKNGDLPWPPLRNEFRYFQRMTTTSSVEGKQNLVIMGKKTWFSIPEKNRPLKGRINLVLSRELREPPQGAHFLSRSLDDALKLTEQPELANKVDMVWIVGGSSVYKEAMNHPGHLKLFVTRIMQDFESDTFFPEIDLEKYKLLPEYPGVLSDVQEEKGIKYKFEVYEKND

SEQ ID NO: 7 - protein, 187 aa, synthetic construct
  REGION 1..187: note = Description of Artificial Sequence: Synthetic destabilizing domain (DD)
MVGSLNCIVAVSQNMGIGKNGDLPWPPLRNEFRYFQRMTTTSSVEGKQNLVIMGKKTWFSIPEKNRPLKGRINLVLSRELKEPPQGAHFLSRSLDDALKLTEQPELANKVDMVWIVGGSSVYKEAMNHPGHLKLFVTRIIQDFESDTFFPEIDLEKYKLLPEYPGVLSDVQEEKGIKYKFEVYEKND

SEQ ID NO: 8 - protein, 187 aa, synthetic construct
  REGION 1..187: note = Description of Artificial Sequence: Synthetic destabilizing domain (DD)
MVGSLNCIVAVSQNMGIGKNGDLPWPPLRNEFRYFQRMTTTSSVEGKQNLVIMGKKTWFSIPEKNRPLKGRINLVLSRELKEPPQGAHFLSRSLDDALKLTEQPELANKVDMVWIVGGSSVYKEAMYHPGHLKLFVTRIMQDFESDTFFPEIDLEKYKLLPEYPGVLSDVQEEKGIKYKFEVYEKND

SEQ ID NO: 9 - protein, 187 aa, synthetic construct
  REGION 1..187: note = Description of Artificial Sequence: Synthetic destabilizing domain (DD)
MVGSLNCIVAVSQNMGIGKNGDLPWPPLRNEFRYFQRMTTTSSVEGKQNLVIMGKKTWFSIPEKNRPLKGRINLVLSRELKEPPQGAHFLSRSLDDALKLTEQPELANKVDMVWIVGGSSVYKEAMNHPGHLKLFVTRIMQDFESDTFFPEIDLEKYKLLPEYPGVLSDVQEEKGIKYKFEVYEKDD

SEQ ID NO: 10 - protein, 187 aa, synthetic construct
  REGION 1..187: note = Description of Artificial Sequence: Synthetic destabilizing domain (DD)
MVGSLNCIVAVSQNMGIGKNGDLPWPPLRNEFRYFQRMTTTSSVEGKQNLVIMGKKTWFSIPEKDRPLKGRINLVLSRELKEPPQGAHFLSRSLDDALKLTEQPELANKVDMVWIVGGSSVYKEAMNHPGHLKLFVTRIMQDFESDTFFPEIDLEKYKLLPEYPGVLSDVQEEKGIKYKFEVYEKND

SEQ ID NO: 11 - protein, 187 aa, synthetic construct
  REGION 1..187: note = Description of Artificial Sequence: Synthetic destabilizing domain (DD)
MVGSLNCIVAVSQNMGIGKNGDLPWPPLRNEFRYFQRMTTTSSVEGKQNLVIMGKKTWFSIPEKNRPLKGRINLVLSRELKEPPQGAHFLSRSLDDALKLTEQPELANKVDMVWIVGGSSVIKEAMNHPGHLKLFVTRIMQDFESDTFFPEIDLEKYKLLPEYPGVLSDVQEEKGIKYKFEVYEKND

SEQ ID NO: 12 - protein, 187 aa, synthetic construct
  REGION 1..187: note = Description of Artificial Sequence: Synthetic destabilizing domain (DD)
MVGSLNCIVVVSQNMGIGKNGDLPWPPLRNEFRYFQRMTTTSSVEGKQNLVIMGKKTWFSIPEKNRPLKGRINLVLSRELKEPPQGAYFLSRSLDDALKLTEQPELANKVDMVWIVGGSSVYKEAMNHPGHLKLFVTRIMQDFESDTFFPEIDLEKYKLLPEYPGVLSDVQEEKGIKYKFEVYEKND

SEQ ID NO: 13 - protein, 186 aa, synthetic construct
  REGION 1..186: note = Description of Artificial Sequence: Synthetic destabilizing domain (DD)
VGSLNCIVAVSQNMGIGKNGDLPWPPLRNEFRYFQRMTTTSSVEGKQNLVIMGKKTWFSIPEKNRPLKGRINLVLSRELKEPPQGAHFLSRSLDDALKLTEQPELANKVDMVWIVGGSSVIKEAMNHPGHLKLFVTRIMQDFESDTFFPEIDLEKYKLLPEYPGVLSDVQEEKGIKYKFEVYEKND

SEQ ID NO: 14 - protein, 187 aa, synthetic construct
  REGION 1..187: note = Description of Artificial Sequence: Synthetic destabilizing domain (DD)
MVGSLNRIVAVSQNMGIGKNGDLPWPPLRNEFRYFQRMTTTSSVEGKQNLVIMGKKTWFSIPEKNRPLKGRINLVLSRELKEPPQGAHFLSRSLDDALKLTEQPELANKVDMVWIVGGSSVYKEAMNHPGHLKLFVTRIMQDFESDTFFPEIDLEKYKLLPECPGVLSDVQEEKGIKYKFEVYEKND

SEQ ID NO: 15 - protein, 187 aa, synthetic construct
  REGION 1..187: note = Description of Artificial Sequence: Synthetic destabilizing domain (DD)
MVGSLNCIVAVSQNMGIGKNGDLPWPPLRNEFRYFQRMTTTSSVEGKQNLVIMGKKTWFSIPEKNRPLKGRINLVLSRELKEPPQGAHFLSRSLDDALKLTEQPELANKVDMVWIVGGSSVYKEAMNHPGHLKLFVTRIMQDFESDTFFPEIDLEKYKLLPGYPGVLSDVQEEKGFKYKFEVYEKND

SEQ ID NO: 16 - protein, 187 aa, synthetic construct
  REGION 1..187: note = Description of Artificial Sequence: Synthetic destabilizing domain (DD)
MVGSLNCIVAVSQNMGIGKNTDLPWPPLRNEFRYFQRMTTTSSVEGKQNLVIMGKKTWFSIPEKNRPLKGRINLVLSRELKEPPQGAHFLSRSLDDALKLTEQPELANKVDMVWIVGGSSVIKEAMNHPGHLKLFVTRIMQDFESDTFFPEIDLEKYKLLPEYPGVLSDVQEEKGIKYKFEVYEKND

SEQ ID NO: 17 - protein, 187 aa, synthetic construct
  REGION 1..187: note = Description of Artificial Sequence: Synthetic destabilizing domain (DD)
MVGSLNCIVAVSQNMGIGKNGDLPWPPLRNEFRYFQRMTTTSSVEGKQNLVIMGKKTWFSIPEKNRPLKGRINLVLSRELKEPPQGAHFLSRSLDDALKLTEQPELANKVDMVWIVGGSSVYKEAMNHPGRLKLFVTRIMQDFGSDTFFPEIDLEKYKLLPEYPGVLSDVQEEKGIKYKFEVYEKND

SEQ ID NO: 18 - protein, 187 aa, synthetic construct
  REGION 1..187: note = Description of Artificial Sequence: Synthetic destabilizing domain (DD)
MVGSLNCIVAVSQNMGVGKNGDLPWPPLRNEFRYFQRMTTTSSVEGKQNLVIMGKKTWFSIPEKNRPLKGRINLVLSRELKEPPQGAHFLSRSLDDALKLTEQPELANKVDMVWIVGGSSVIKEAMNHPGHLKLFVTRIMQDFESDTFFPEIDLEKYKLLPEYPGVLSDVQEEKGIKYKFEVYEKND

SEQ ID NO: 19 - protein, 187 aa, synthetic construct
  REGION 1..187: note = Description of Artificial Sequence: Synthetic destabilizing domain (DD)
MVGSLNCIVAVSQNMGIGKNGDLPWPPLRNEFRYFQRMTTTSSVEGKQNLVIMGKKTWFSIPEKNRPLKGRINNVLSRELKEPPQGAHFLSRSLDDALKLTEQPELANKVDMVWIVGGSSVIKEAMNHPGHLKLFVTRIMQDFESDTFFPEIDLEKYKLLPEYPGVLSDVQEEKGIKYKFEVYEKND

SEQ ID NO: 20 - protein, 187 aa, synthetic construct
  REGION 1..187: note = Description of Artificial Sequence: Synthetic destabilizing domain (DD)
MVGSLNCIVAVSQNMGIGKNGDLPWPPLRNEFRYFQRMTTTSSVEGKQNLVIMGKKTWFSIPEKNRPLKGRINLVLSRELKEPPQGAHFLSRSADDALKLTEQPELANKVDMVWIVGGSSVYKEAMNHPGHLKLFVTRIMQDFESDAFFPEIDLEKYKLLPEYPGVLSDVQEEKGIKYKFEVYEKND

SEQ ID NO: 21 - protein, 187 aa, synthetic construct
  REGION 1..187: note = Description of Artificial Sequence: Synthetic destabilizing domain (DD)
MVGSLNCIVAVSQNMGIGKNGDLPWPPLRNEFRYFQRMTTTSSVEGKQNLVITGKKTWFSIPEKNRPLKGRINLVLSRELKEPPQGAHFLSRSLDDALKLTEQPELANKVDMVWIVGGSSVYKEAMNHPGHLKLFVTIIMQDFESDTFFPEIDLEKYKLLPEYPGVLSDVQEEKGIKYKFEVYEKND

SEQ ID NO: 22 - protein, 187 aa, synthetic construct
  REGION 1..187: note = Description of Artificial Sequence: Synthetic destabilizing domain (DD)
MVGSLNCIVAVSQNMGIGKNGDLPWPPLRNEFRYFQRMTTTSSVEGKQNLVIMGKKTWFSIPEKNRPLKGRINLVLSRELKEPPQGAHFLSRSLDDALKLTEQPELANKVDMVWIVGGSSVIKEAMYHPGHLKLFVTRIMQDFESDTFFPEIDLEKYKLLPEYPGVLSDVQEEKGIKYKFEVYEKND

SEQ ID NO: 23 - protein, 187 aa, synthetic construct
  REGION 1..187: note = Description of Artificial Sequence: Synthetic destabilizing domain (DD)
MVGSLNCIVAVSQNMGIGKNGDLPWPPLRNEFRYFKRMTTTSSVEGKQNLVIMGKKTWFSIPEKNRPLKGRINLVLSRELKEPPQGAHFLSRSLDDALKLTEQPELANKVDMVWIVGGSSVIKEAMNHPGHLKLFVTRIMQDFESDTFFPEIDLEKYKLLPEYPGVLSDVQEEKGIKYKFEVYEKND

SEQ ID NO: 24 - protein, 187 aa, synthetic construct
  REGION 1..187: note = Description of Artificial Sequence: Synthetic destabilizing domain (DD)
MVGSLNCIVAVSQNMGIGKNGDLPWPPLRNEFRYFQRMTTTSSVEGKQNLVIMGKKTWFSIPEKNRPLKGRINLVLSRELKEPPQGAHFLSRSLDDALKLTEQPELANKVDMVWIVGGSSVYKEAMNHPGHLKLFVRRIMQDLESDTFFPEIDLEKYKLLPEYPGVLSDVQEEKGIKYKFEVYEKND

SEQ ID NO: 25 - protein, 187 aa, synthetic construct
  REGION 1..187: note = Description of Artificial Sequence: Synthetic destabilizing domain (DD)
MVGSLNCIVAVSQNMGIGKNGDLPWPPLRNEFRYFQRMTTTSSVEGKQNLVIMGKKAWFSIPEKNRPLKGRANLVLSRELKEPPQGAHFLSRSLDDALKLTEQPELANKVDMVWIVGGSSVYKEAMNHPGHLKLFVTRIMQDFESDTFFPEIDLEKYKLLPEYPGVLSDVQEEKGIKYKFEVYEKND

SEQ ID NO: 26 - protein, 187 aa, synthetic construct
  REGION 1..187: note = Description of Artificial Sequence: Synthetic destabilizing domain (DD)
MVGSLNCIVAVSQNMGIGKNGDLPWPPLRNEFRYFQRMTTTSSVEGKQNLVIMGKKTWFSIPEKNRPLKGRINLVLSRELKEPPQGAHFLSRSLDDALKLTEQPELANKVDMVWIVGGSSAIKEAMNHPGHLKLFVTRIMQDFESDTFFPEIDLEKYKLLPEYPGVLSDVQEEKGIKYKFEVYEKND

SEQ ID NO: 27 - protein, 187 aa, synthetic construct
  REGION 1..187: note = Description of Artificial Sequence: Synthetic destabilizing domain (DD)
MVGSLNCIVAVSQNMGIGKNGDLPWPPLRNEFRYFQRMTTTSSVEGKQNLVIMGKKTWFSIPEKNRPLKGRINLFLSRELKEPPQGAHFLSRSLDDALKLTEQPELANKVDMVWIVGGSSVIKEAMNHPGHLKLFVTRIMQDFESDTFFPEIDLEKYKLLPEYPGVLSDVQEEKGIKYKFEVYEKND

SEQ ID NO: 28 - protein, 187 aa, synthetic construct
  REGION 1..187: note = Description of Artificial Sequence: Synthetic destabilizing domain (DD)
MVGSLNCIVAVSQNMGIGKNGDLPWPPLRNEFRYFQRMTTTSSVEGKQNLVIMGKKTWFSIPEKNRPLKGRINLVLSRELKEPPQGAHFLSRSLDDALKLTEQPELANKVDMVWIVGGSSVIKEFMNHPGHLKLFVTRIMQDFESDTFFPEIDLEKYKLLPEYPGVLSDVQEEKGIKYKFEVYEKND

SEQ ID NO: 29 - protein, 187 aa, synthetic construct
  REGION 1..187: note = Description of Artificial Sequence: Synthetic destabilizing domain (DD)
MVGSLNCIVAVSQNMGIGKNGDLPWPPLRNEFRYFQRMTTTSSVEGKQNLVIMGKKTWFSIPEKNRPLKGRINLVLSRELKEPPQGAHFLSRSLDDALKLTEQPELANKVDMVWIVGGSSVIKEAMNHPGHLKLFVTRIIQDFESDTFFPEIDLEKYKLLPEYPGVLSDVQEEKGIKYKFEVYEKND

SEQ ID NO: 30 - protein, 187 aa, synthetic construct
  REGION 1..187: note = Description of Artificial Sequence: Synthetic destabilizing domain (DD)
MVGSLNCIVAVSQNMGIGKNGDLPWPPLRNEFRYFQRMTTTSSVEGKQNLVIMGKKTWFSIPEKNRPLKGRINLVLSRELKEPPQGAHFLSRSLDDALKLTEQPELANKVDMVWIVGGSSVYKEAMNHPGHLKLFVTRIMQDFESDTFFPEIDLEKYKLLPEYPGVLSDVQEEKGIKHKFGVYEKND

SEQ ID NO: 31 - protein, 187 aa, synthetic construct
  REGION 1..187: note = Description of Artificial Sequence: Synthetic destabilizing domain (DD)
MVGSLNCIVAVSQNMGIGKNGDLPWPPLRNEFRYFQRMTTTSSVEGKQNLVIMGKKTWFSIPEKNRPLKGRINLVLSRELKEPPQGAHFLSRSLDDALKLTEQPELANKVDMVWIVGGSSVYKEAMNHPGHLKLFVTRIMQDFESDTFFPEIDLEKYKLLPEYPGVLSDVQEEKGIKYKFEVHEEND

SEQ ID NO: 32 - protein, 186 aa, synthetic construct
  REGION 1..186: note = Description of Artificial Sequence: Synthetic destabilizing domain (DD)
VGSLNCIVAVSQNMGIGKNTDLPWPPLRNEFRYFQRMTTTSSVEGKQNLVIMGKKTWFSIPEKNRPLKGRINLVLSRELKEPPQGAHFLSRSLDDALKLTEQPELANKVDMVWIVGGSSVIKEAMNHPGHLKLFVTRIMQDFESDTFFPEIDLEKYKLLPEYPGVLSDVQEEKGIKYKFEVYEKND

SEQ ID NO: 33 - protein, 186 aa, synthetic construct
  REGION 1..186: note = Description of Artificial Sequence: Synthetic destabilizing domain (DD)
VGSLNCIVAVSQNMGVGKNGDLPWPPLRNEFRYFQRMTTTSSVEGKQNLVIMGKKTWFSIPEKNRPLKGRINLVLSRELKEPPQGAHFLSRSLDDALKLTEQPELANKVDMVWIVGGSSVIKEAMNHPGHLKLFVTRIMQDFESDTFFPEIDLEKYKLLPEYPGVLSDVQEEKGIKYKFEVYEKND

SEQ ID NO: 34 - protein, 186 aa, synthetic construct
  REGION 1..186: note = Description of Artificial Sequence: Synthetic destabilizing domain (DD)
VGSLNCIVAVSQNMGIGKNGDLPWPPLRNEFRYFQRMTTTSSVEGKQNLVIMGKKTWFSIPEKNRPLKGRINNVLSRELKEPPQGAHFLSRSLDDALKLTEQPELANKVDMVWIVGGSSVIKEAMNHPGHLKLFVTRIMQDFESDTFFPEIDLEKYKLLPEYPGVLSDVQEEKGIKYKFEVYEKND

SEQ ID NO: 35 - protein, 186 aa, synthetic construct
  REGION 1..186: note = Description of Artificial Sequence: Synthetic destabilizing domain (DD)
VGSLNCIVAVSQNMGIGKNGDLPWPPLRNEFRYFQRMTTTSSVEGKQNLVIMGKKTWFSIPEKNRPLKGRINLVLSRELKEPPQGAHFLSRSADDALKLTEQPELANKVDMVWIVGGSSVYKEAMNHPGHLKLFVTRIMQDFESDAFFPEIDLEKYKLLPEYPGVLSDVQEEKGIKYKFEVYEKND

SEQ ID NO: 36 - protein, 186 aa, synthetic construct
  REGION 1..186: note = Description of Artificial Sequence: Synthetic destabilizing domain (DD)
VGSLNCIVAVSQNMGIGKNGDLPWPPLRNEFRYFQRMTTTSSVEGKQNLVITGKKTWFSIPEKNRPLKGRINLVLSRELKEPPQGAHFLSRSLDDALKLTEQPELANKVDMVWIVGGSSVYKEAMNHPGHLKLFVTIIMQDFESDTFFPEIDLEKYKLLPEYPGVLSDVQEEKGIKYKFEVYEKND

SEQ ID NO: 37 - protein, 186 aa, synthetic construct
  REGION 1..186: note = Description of Artificial Sequence: Synthetic destabilizing domain (DD)
VGSLNCIVAVSQNMGIGKNGDLPWPPLRNEFRYFQRMTTTSSVEGKQNLVIMGKKTWFSIPEKNRPLKGRINLVLSRELKEPPQGAHFLSRSLDDALKLTEQPELANKVDMVWIVGGSSVIKEAMYHPGHLKLFVTRIMQDFESDTFFPEIDLEKYKLLPEYPGVLSDVQEEKGIKYKFEVYEKND

SEQ ID NO: 38 - protein, 186 aa, synthetic construct
  REGION 1..186: note = Description of Artificial Sequence: Synthetic destabilizing domain (DD)
VGSLNCIVAVSQNMGIGKNGDLPWPPLRNEFRYFKRMTTTSSVEGKQNLVIMGKKTWFSIPEKNRPLKGRINLVLSRELKEPPQGAHFLSRSLDDALKLTEQPELANKVDMVWIVGGSSVIKEAMNHPGHLKLFVTRIMQDFESDTFFPEIDLEKYKLLPEYPGVLSDVQEEKGIKYKFEVYEKND

SEQ ID NO: 39 - protein, 186 aa, synthetic construct
  REGION 1..186: note = Description of Artificial Sequence: Synthetic destabilizing domain (DD)
VGSLNCIVAVSQNMGIGKNGDLPWPPLRNEFRYFQRMTTTSSVEGKQNLVIMGKKTWFSIPEKNRPLKGRINLVLSRELKEPPQGAHFLSRSLDDALKLTEQPELANKVDMVWIVGGSSAIKEAMNHPGHLKLFVTRIMQDFESDTFFPEIDLEKYKLLPEYPGVLSDVQEEKGIKYKFEVYEKND

SEQ ID NO: 40 - protein, 186 aa, synthetic construct
  REGION 1..186: note = Description of Artificial Sequence: Synthetic destabilizing domain (DD)
VGSLNCIVAVSQNMGIGKNGDLPWPPLRNEFRYFQRMTTTSSVEGKQNLVIMGKKTWFSIPEKNRPLKGRINLFLSRELKEPPQGAHFLSRSLDDALKLTEQPELANKVDMVWIVGGSSVIKEAMNHPGHLKLFVTRIMQDFESDTFFPEIDLEKYKLLPEYPGVLSDVQEEKGIKYKFEVYEKND

SEQ ID NO: 41 - protein, 186 aa, synthetic construct
  REGION 1..186: note = Description of Artificial Sequence: Synthetic destabilizing domain (DD)
VGSLNCIVAVSQNMGIGKNGDLPWPPLRNEFRYFQRMTTTSSVEGKQNLVIMGKKTWFSIPEKNRPLKGRINLVLSRELKEPPQGAHFLSRSLDDALKLTEQPELANKVDMVWIVGGSSVIKEFMNHPGHLKLFVTRIMQDFESDTFFPEIDLEKYKLLPEYPGVLSDVQEEKGIKYKFEVYEKND

SEQ ID NO: 42 - protein, 186 aa, synthetic construct
  REGION 1..186: note = Description of Artificial Sequence: Synthetic destabilizing domain (DD)
VGSLNCIVAVSQNMGIGKNGDLPWPPLRNEFRYFQRMTTTSSVEGKQNLVIMGKKTWFSIPEKNRPLKGRINLVLSRELKEPPQGAHFLSRSLDDALKLTEQPELANKVDMVWIVGGSSVIKEAMNHPGHLKLFVTRIIQDFESDTFFPEIDLEKYKLLPEYPGVLSDVQEEKGIKYKFEVYEKND

SEQ ID NO: 43 - protein, 187 aa, synthetic construct
  REGION 1..187: note = Description of Artificial Sequence: Synthetic destabilizing domain (DD)
MVGSLNCIVAVSQNMGIGKNGDLPWPPLRNDMRYFQRMTTTSSVEGKQNLVIMGKKTWFSIPEKNRPLKGRINLVLSRELKEPPQGAHFLSRSLDDALKLTEQPELANKVDMVWIIGGSSVYKEAMNHPGHLKLFVTRIMQDFESDTFFPEIDLEKYKLLPEYPGVLSDVQEEKGIKYKFEVYEKND

SEQ ID NO: 44 - protein, 187 aa, synthetic construct
  REGION 1..187: note = Description of Artificial Sequence: Synthetic destabilizing domain (DD)
MVGSLNCIVAVSQNMGIGKNEDLPWPPLRNEFRYFQRMTTTSSVEGKQNLVIMGKKTWFSIPEKNRPLKGRVNLVLSRELKEPPQGAHFLSRSLDDALKLTEQPELANKVDMVWIVGGSSVYKEAMNHPGHLKLFVTRIMQDFESDTFFPEIDLEKYKLLPEYPGVLSDVQEEKGTKYKFEVYEKND

SEQ ID NO: 45 - protein, 187 aa, synthetic construct
  REGION 1..187: note = Description of Artificial Sequence: Synthetic destabilizing domain (DD)
MVGSLNCVVAVSQNMGIGKNGDLPWPPLRNEFRYFQRMTTTSSVEGKQNLVIMGKKTWFSIPEKNRPLKGRINLVLSRELKEPPQGAHFLSRSLDDALKLTEQPELANKVDMVWIVGGSSVYKEAMNHPGHLELFVTRIMQDFESDTFFPEIDLEKYKLLPECPGVLSDVQEEKGIKYKFEVYEKND

SEQ ID NO: 46 - protein, 187 aa, synthetic construct
  REGION 1..187: note = Description of Artificial Sequence: Synthetic destabilizing domain (DD)
MVGSLNCIVAVSQNMGIGENGDLPWPPLRNEFRYFQRMTTTSSVEGKQNLVIMGKKTWFSIPEKNRPLKGRINLVLSRELKEPPQGAHLLSRSLDDALKLTEQPELANKVDMVWIVGGSSVYKEAMNHPGHLKLFVTRIMQDFESDTFFPEIDLEKYKLLPEYPGVLSDVQEEKGIKYKFGVYEKND

SEQ ID NO: 47 - protein, 187 aa, synthetic construct
  REGION 1..187: note = Description of Artificial Sequence: Synthetic destabilizing domain (DD)
MVGSLNCIVAVSQNMGIGKNGDSPWPPLRNEFRYFQRMTTTSSVEGKQNLVIMGKKTWFSIPEKNRPLKGRINLVLSRELKEPPQGAHFLSRSLDDALKLTEQPELANKVDMVWIVGGSSAYKEAMNHPGHLKLFVTRIMQDFESDTFFPEIDLEKCKLLPEYPGVLSDVQEEKGIKYKFEVYEKND

SEQ ID NO: 48 - protein, 187 aa, synthetic construct
  REGION 1..187: note = Description of Artificial Sequence: Synthetic destabilizing domain (DD)
MVGSLNCIVAVSQNMGIGKNGDLPWPPLRNEFRYFQRMTTTSSVEGKQDLVIMGKKTWSSIPEKNRPLKGRINLVLSRELKEPPQGAHFLSRSLDDALKLTEQPELANKVDMVWIVGGSSVYKEAMNHPGHLKLFVTRIMQDFESDTFFPEIGLEKYKLLPEYPGVLSDVQEEKGIKYKFEVYEKND

SEQ ID NO: 49 - protein, 187 aa, synthetic construct
  REGION 1..187: note = Description of Artificial Sequence: Synthetic destabilizing domain (DD)
MVGSLNCIVAVSQNMGIGKNGDLPWPPLRNEFRYFFRMTTTSSVEGKQNLVIMGKKTWFSIPEKFRPLKGRINLVLSRELKEPPQGAHFLSRSLDDALKLTEQPELANKVDMVWIVGGSSVIKEAMNHPGHLKLFVTRIMQDFESDTFFPEIDLEKYKLLPEYPGVLSDVQEEKGIKYKFEVYEKND

SEQ ID NO: 50 - protein, 187 aa, synthetic construct
  REGION 1..187: note = Description of Artificial Sequence: Synthetic destabilizing domain (DD)
MVGSLNCIVAVSQNMGIGKNGDLPWPPLRNEFRYFFRMTTTSSVEGKQNLVIMGKKTWFSIPEKNRPLKGRINLVLSRELKEPPQGAHFLSRSLDDALKLTEQPELANKVDMVWIVGGSSVIKEFMNHPGHLKLFVTRIMQDFESDTFFPEIDLEKYKLLPEYPGVLSDVQEEKGIKYKFEVYEKND

SEQ ID NO: 51 - protein, 187 aa, synthetic construct
  REGION 1..187: note = Description of Artificial Sequence: Synthetic destabilizing domain (DD)
MVGSLNCIVAVSQNMGIGKNGDLPWPPLRNEFRYFQRMTTTSSVEGKQNLVIMGKKTWFSIPEKNRPLKGRINLVLSRELKEPPQGAHFLSRSLDDALKLTEQPELANKADMVWIVGGSSVYKEAMNHPGHLKLFMTRIMQDFESDTFFPEIDLEKYKLLPEYPGVLSDVQEEKGIRYKFEVYEKND

SEQ ID NO: 52 - protein, 187 aa, synthetic construct
  REGION 1..187: note = Description of Artificial Sequence: Synthetic destabilizing domain (DD)
MVGSLNCIAAVSQNMGIGKNGDLPWPPLRNEFRYFQRMTTTSSVEGKQNLVIMGKKTWFSIPEKNRPLKGRINLVLSRELKEPPQGAHFLSRRLDDALKLTEQPELANKVDMVWIVGGSSVYKEAMNHPGHLKLFVTRIMQDFESDTFFLEIDLEKYKLLPEYPGVLSDVQEEKGIKYKFEVYEKND

SEQ ID NO: 53 - protein, 187 aa, synthetic construct
  REGION 1..187: note = Description of Artificial Sequence: Synthetic destabilizing domain (DD)
MVGSLNCIVAVSQNMGIGKNGDLPWPPLRNEFRYFQRMTTTSSVEGKQNLVIMGKKTWFSIPEKNRPLKGRINLVLSRELKEPPQGAHFLSRSLDDALKLTEQPELANKVDMVWIVGGSSVIKEAMNHPGRLKLFVTRIMQDFGSDTFFPEIDLEKYKLLPEYPGVLSDVQEEKGIKYKFEVYEKND

SEQ ID NO: 54 - protein, 187 aa, synthetic construct
  REGION 1..187: note = Description of Artificial Sequence: Synthetic destabilizing domain (DD)
MVGSLNCIVAVSQNMGIGKNGDLPWPPLRNEFRYFQRMTTTSSVEGKQNLVIMRKKTWFSIPEKNRPLKGRINLVLSRELKEPPQGAHFLSRSLDDALKLTEQPELANKVDMVWLVGGSSVYKEAMNHPGHLKLFVTRIVQDFESDTFFPEIDLEKYKLLPEYPGVLCDVQEEKGIKYKFEVYEKND

SEQ ID NO: 55 - protein, 186 aa, synthetic construct
  REGION 1..186: note = Description of Artificial Sequence: Synthetic destabilizing domain (DD)
VGSLNCIVAVSQNMGIGKNGDLPWPPLRNDMRYFQRMTTTSSVEGKQNLVIMGKKTWFSIPEKNRPLKGRINLVLSRELKEPPQGAHFLSRSLDDALKLTEQPELANKVDMVWIIGGSSVYKEAMNHPGHLKLFVTRIMQDFESDTFFPEIDLEKYKLLPEYPGVLSDVQEEKGIKYKFEVYEKND

SEQ ID NO: 56 - protein, 186 aa, synthetic construct
  REGION 1..186: note = Description of Artificial Sequence: Synthetic destabilizing domain (DD)
VGSLNCIVAVSQNMGIGKNGDLPWPPLRNEFRYFFRMTTTSSVEGKQNLVIMGKKTWFSIPEKFRPLKGRINLVLSRELKEPPQGAHFLSRSLDDALKLTEQPELANKVDMVWIVGGSSVIKEAMNHPGHLKLFVTRIMQDFESDTFFPEIDLEKYKLLPEYPGVLSDVQEEKGIKYKFEVYEKND

SEQ ID NO: 57 - protein, 186 aa, synthetic construct
  REGION 1..186: note = Description of Artificial Sequence: Synthetic destabilizing domain (DD)
VGSLNCIVAVSQNMGIGKNGDLPWPPLRNEFRYFFRMTTTSSVEGKQNLVIMGKKTWFSIPEKNRPLKGRINLVLSRELKEPPQGAHFLSRSLDDALKLTEQPELANKVDMVWIVGGSSVIKEFMNHPGHLKLFVTRIMQDFESDTFFPEIDLEKYKLLPEYPGVLSDVQEEKGIKYKFEVYEKND

SEQ ID NO: 58 - protein, 550 aa, synthetic construct
  REGION 1..550: note = Description of Artificial Sequence: Synthetic destabilizing domain (DD)
MEDAKNIKKGPAPFYPLEDGTAGEQLHKAMKRYALVPGTIAFTDAHIEVDITYAEYFEMSVRLAEAMKRYGLNTNHRIVVCSENSLQFFMPVLGALFIGVAVAPANDIYNERELLNSMGISQPTVVFVSKKGLQKILNVQKKLPIIQKIIIMDSKTDYQGFQSMYTFVTSHLPPGFNEYDFVPESFDRDKTIALIMNSSGSTGLPKGVALPHRTACVRFSHARDPIFGNQIIPDTAILSVVPFHHGFGMFTTLGYLICGFRVVLMYRFEEELFLRSLQDYKIQSALLVPTLFSFFAKSTLIDKYDLSNLHEIASGGAPLSKEVGEAVAKRFHLPGIRQGYGLTETTSAILITPEGDDKPGAVGKVVPFFEAKVVDLDTGKTLGVNQRGELCVRGPMIMSGYVNNPEATNALIDKDGWLHSGDIAYWDEDEHFFIVDRLKSLIKYKGYQVAPAELESILLQHPNIFDAGVAGLPDDDAGELPAAVVVLEHGKTMTEKEIVDYVASQVTTAKKLRGGVVFVDEVPKGLTGKLDARKIREILIKAKKGGKIAV

SEQ ID NO: 59 - protein, 187 aa, synthetic construct
  REGION 1..187: note = Description of Artificial Sequence: Synthetic destabilizing domain (DD)
MAGSLNCIVAVSQNMGIGKNGDLPWPPLRNEFGYFRRMTTTSSVEGKQNLVIMGKKTWFSIPEKNRPLKGRINLVLSRELKEPPQGAHFLSRSLDDALKPTEQPELANKVDMVWIVGGSSVYKEAMNHPGHLKLFVTRIMQDFESDTFFPEIDLEKYKLLPEYPGVLSDVQEEKGIKYKFEVYERND

SEQ ID NO: 60 - protein, 187 aa, synthetic construct
  REGION 1..187: note = Description of Artificial Sequence: Synthetic destabilizing domain (DD)
MVGSLNCIVAVSQNMGIGKNGSLPWPPLRNEMSYFSRMTTTSSVEGKQNLVIMGKKTWFSIPEKSRPLKGRINLVLSRELKEPPQGAHFLSRSLDDALKLTEQPELANKVDMVWIVGGSSVYKEAMNHPGHLKLFVTRIMQDFESDTFFPEIDLEKYKLLPEYPGVLSDVQEEKGIKYKFEVYEKND

SEQ ID NO: 61 - protein, 186 aa, synthetic construct
  REGION 1..186: note = Description of Artificial Sequence: Synthetic destabilizing domain (DD)
VGSLNCIVAVSQNMGIGKNGSLPWPPLRNEMSYFSRMTTTSSVEGKQNLVIMGKKTWFSIPEKSRPLKGRINLVLSRELKEPPQGAHFLSRSLDDALKLTEQPELANKVDMVWIVGGSSVYKEAMNHPGHLKLFVTRIMQDFESDTFFPEIDLEKYKLLPEYPGVLSDVQEEKGIKYKFEVYEKND

SEQ ID NO: 62 - protein, 187 aa, synthetic construct
  REGION 1..187: note = Description of Artificial Sequence: Synthetic destabilizing domain (DD)
MVGSLNCIVAVSQNMGNGKNGDLPWPPLRNEFRYFQRMTTTSSVEGKQNLVIMGKKTWFSIPEKNRPLKGRINLVLSRELKEPPQGAHFLSRSLDDASRLTEQPELANKVDTVWIVGGSSVYKEAMNHPGHLKLFVTRIMQDFESDTFFPGIDLEKYKLLPGYPGVLSDVQGEKGIKYKFEVYEKND

SEQ ID NO: 63 - protein, 187 aa, synthetic construct
  REGION 1..187: note = Description of Artificial Sequence: Synthetic destabilizing domain (DD)
MVGSLNCIVAVSQNMSVGKNGDLPWPPLRNEFRYFQRMTTTSSVEGKQNLVIMGKKTWFSIPEKNRPLKGRINLVLSRELKEPPQGAHLLSRSLDGALKLTEQPELANKVDMVWIVGGSSVYEEAMNHPGHLKLFVTRIVQDFESGTFFPEIDLERYKLLPEYPGVLSDVQEEKGIKYKFEVYEKND

SEQ ID NO: 64 - protein, 187 aa, synthetic construct
  REGION 1..187: note = Description of Artificial Sequence: Synthetic destabilizing domain (DD)
MVGSLNCIVAVSQNMGIGKNGDLPWPPLRNEFRYFQRMTTTSSVEGKQNLVIMGKKTWFSIPEKNRPLKGRINLVLSRELREPPQGAHFLSRSLDDALRPTGQPELADKVDMVWIVGGSSVYREAMNRPGHLKLFVTRIMQGFESDTFFPEIDLEKYKLLPEYPGVLSDVQEEKGIKYKLEVYEEND

SEQ ID NO: 65 - protein, 187 aa, synthetic construct
  REGION 1..187: note = Description of Artificial Sequence: Synthetic destabilizing domain (DD)
MVGSLNCIVAVSQNMGIGKNGDLPWPPLRNEFRYFQRMTTTSSVEGKQNLVIMGKKTWFSIPEKNRPLKGRINLVLSRELKEPPQGAHFLSRSLDDALKLTEQPELANKVDMVWIVGGSSVYKEAMNHPGHLKLFVTGIMQGSESDTFFPEIDLERYELLPGYPGALSDVQEEKGIECKFEVYEESD

SEQ ID NO: 66 - protein, 187 aa, synthetic construct
  REGION 1..187: note = Description of Artificial Sequence: Synthetic destabilizing domain (DD)
MVGSLNCIVAVSQSMGIGKNGDLSWPPLRNEFRYLQRMTTTSSVEGKQNLVITGKETWFSIPEKNRPLKGRINLVLSRELKEPPQGAHFLSGGLDDALKLTEQPELANKVDMVWIVGGSSVYKEAMSYPGHLKLLVTRIMQDSESDTFFPEIDLEKYKPPPEYPGVLSDVQEAKGIKYKLEVYEKND

SEQ ID NO: 67 - protein, 187 aa, synthetic construct
  REGION 1..187: note = Description of Artificial Sequence: Synthetic destabilizing domain (DD)
MVGSLNCIVAVSQNMGIGKNGDLPWPPLRNEFRYLQGMTTTSSVEGKQNLVIMGKKTWFSIPEKARPSEGGINLVLSREPKEPPQGAHFLSRSLDDALGLTEQPELANKVDMVWIVDGSSVYKEAMNHPGHPKLFVTRVIQGFESGTFFPEIDLEKYKLLPEYPGVLSDVQEGKGIKYKFEVYEKNG

SEQ ID NO: 68 - protein, 187 aa, synthetic construct
  REGION 1..187: note = Description of Artificial Sequence: Synthetic destabilizing domain (DD)
MVGSLNCIVAVSQNMGIGKNGDLPWPPPRHEFRYFQRVTTTSSAEGKQNLVIMGKKTWFSIPEKNRPSKGRIGLVLSGELKEPPQGAHFLSRSLDDTLRLTEQPELTNRVNMVWIVGGSSVYKEAMNHPGHLRPVVTRIMQDFESDAFFPEVDLEKYRLLPEYPGVLSDVQGEKGIKYKFEAYRKND

SEQ ID NO: 69 - protein, 187 aa, synthetic construct
  REGION 1..187: note = Description of Artificial Sequence: Synthetic destabilizing domain (DD)
MAGSLNCIVAVSQNMGVGKNGDLPWPPLRDGFRYFRRMTTTSSVEGKQNLVIMGKKTWSSIPEKNRPLEGRTNLVLSRELKEPPQGAYLLSRSLDDALKLTEQPELADEAGMVWVVGGSSVDKEAMNHPGHPKLSVTRIVQDFGSDAFFPEIDLEKCKLLPEYPGVLSDAQEERGIKYKFEVYEKSD

SEQ ID NO: 70 - protein, 187 aa, synthetic construct
  REGION 1..187: note = Description of Artificial Sequence: Synthetic destabilizing domain (DD)
MVGSLNCIVAVSQNMGIGKNGDLPWPPLRNEFRYFQRMTTTSSVEGKQNLVIMGKKTWFSIPEKNRPLKGRINLVLSRELKEPPQGAHFLSRSLDDALKPTGRSGLADKVDMARIVGGSSVCKEAIRYPGHPKLPVTRTMQDFESDTSLPEVALEKYKLLPEYPGVLSGAQEEKGARYKFEAYERSD

SEQ ID NO: 71 - protein, 186 aa, synthetic construct
  REGION 1..186: note = Description of Artificial Sequence: Synthetic destabilizing domain (DD)
MVGSLNCIVTVSRSMGIGKDGDLSWPPLRSEFRYFQRTTATSSVEGRQSLVIMGKRTWFSTPERNRPLRGRANLVLSGELKGPPQGAHLLSRSLDGALKLTEQPELADKVDVVRIVGGSSVDEEAMNHPGHLKLFVTRVMRGFESDTLFPGIDLGKRKLLPEYPGVLSDVREEKGIKYKLEVCGNN

SEQ ID NO: 72 - DNA, 561 bp, synthetic construct
  misc_feature 1..561: note = Description of Artificial Sequence: Synthetic destabilizing domain (DD)
  source 1..561: mol_type = other DNA
gtgggctccctgaactgcatcgtggccgtgagccagaacatgggcatcggcaagaatggcgacctgccttggccacctctgaggaacgagttcagatactttcagaggatgaccacaaccagctccgtggagggcaagcagaacctggtcatcatgggcaagaagacatggttctctatccccgagaagaaccgccctctgaagggccggatcaatctggtgctgagcagagagctgaaggagccaccacagggagcacacttcctgagccggagcctggacgatgccctgaagctgaccgagcagcccgagctggccaacaaggtggacatggtgtggatcgtgggcggctctagcgtgatcaaggaggccatgaatcacccaggccacctgaagctgttcgtgacaagaatcatgcaggactttgagtccgataccttctttcccgagatcgacctggagaagtacaagctgctgcctgagtatccaggcgtgctgtctgatgtgcaggaggagaagggcatcaagtacaagttcgaggtgtatgagaagaatgattga

SEQ ID NO: 73 - DNA, 561 bp, synthetic construct
  misc_feature 1..561: note = Description of Artificial Sequence: Synthetic destabilizing domain (DD)
  source 1..561: mol_type = other DNA
atggttggttcgctaaactgcatcgtcgctgtgtcccagaacatgggcatcggcaagaacggggacctgccctggccaccgctcaggaatgaattcagatatttccagagaatgaccacaacctcttcagtagaaggtaaacagaatctggtgattatgggtaagaagacctggttctccattcctgagaagaatcgacctttaaagggtagaattaatttagttctcagcagagaactcaaggaacctccacaaggagctcattttctttccagaagtctagatgatgccttaaaacttactgaacaaccagaattagcaaataaagtagacatggtctggatagttggtggcagttctgttattaaggaagccatgaatcacccaggccatcttaaactatttgtgacaaggatcatgcaagactttgaaagtgacacgttttttccagaaattgatttggagaaatataaacttctgccagaatacccaggtgttctctctgatgtccaggaggagaaaggcattaagtacaaatttgaagtatatgagaagaatgat

SEQ ID NO: 74 - DNA, 561 bp, synthetic construct
  misc_feature 1..561: note = Description of Artificial Sequence: Synthetic destabilizing domain (DD)
  source 1..561: mol_type = other DNA
atggttggttcgctaaactgcatcgtcgctgtgtcccagaacatgggcatcggcaagaacggggacctgccctggccaccgctcaggaatgaattcagatatttccagagaatgaccacaacctcttcagtagaaggtaaacagaatctggtgattacgggtaagaagacctggttctccattcctgagaagaatcgacctttaaagggtagaattaatttagttctcagcagagaactcaaggaacctccacaaggagctcattttctttccagaagtctagatgatgccttaaaacttactgaacaaccagaattagcaaataaagtagacatggtctggatagttggtggcagttctgtttataaggaagccatgaatcacccaggccatcttaaactatttgtgacaatcatcatgcaagactttgaaagtgacacgttttttccagaaattgatttggagaaatataaacttctgccagaatacccaggtgttctctctgatgtccaggaggagaaaggcattaagtacaaatttgaagtatatgagaagaatgat

SEQ ID NO: 75 - DNA, 561 bp, synthetic construct
  misc_feature 1..561: note = Description of Artificial Sequence: Synthetic destabilizing domain (DD)
  source 1..561: mol_type = other DNA
atggttggttcgctaaactgcatcgtcgctgtgtcccagaacatgggcatcggcaagaacggggacctgccctggccaccgctcaggaatgaattcagatatttccagagaatgaccacaacctcttcagtagaaggtaaacagaatctggtgattatgggtaagaagacctggttctccattcctgagaagaatcgacctttaaagggtagaattaatttatttctcagcagagaactcaaggaacctccacaaggagctcattttctttccagaagtctagatgatgccttaaaacttactgaacaaccagaattagcaaataaagtagacatggtctggatagttggtggcagttctgttattaaggaagccatgaatcacccaggccatcttaaactatttgtgacaaggatcatgcaagactttgaaagtgacacgttttttccagaaattgatttggagaaatataaacttctgccagaatacccaggtgttctctctgatgtccaggaggagaaaggcattaagtacaaatttgaagtatatgagaagaatgat

SEQ ID NO: 76 - DNA, 561 bp, synthetic construct
  misc_feature 1..561: note = Description of Artificial Sequence: Synthetic destabilizing domain (DD)
  source 1..561: mol_type = other DNA
atggttggttcgctaaactgcatcgtcgctgtgtcccagaacatgggcatcggcaagaacggggacctgccctggccaccgctcaggaatgaattcagatatttccagagaatgaccacaacctcttcagtagaaggtaaacagaatctggtgattatgggtaagaagacctggttctccattcctgagaagaatcgacctttaaagggtagaattaatttagttctcagcagagaactcaaggaacctccacaaggagctcattttctttccagaagtctagatgatgccttaaaacttactgaacaaccagaattagcaaataaagtagacatggtctggatagttggtggcagttctgttattaaggaattcatgaatcacccaggccatcttaaactatttgtgacaaggatcatgcaagactttgaaagtgacacgttttttccagaaattgatttggagaaatataaacttctgccagaatacccaggtgttctctctgatgtccaggaggagaaaggcattaagtacaaatttgaagtatatgagaagaatgat

SEQ ID NO: 77 - DNA, 561 bp, synthetic construct
  misc_feature 1..561: note = Description of Artificial Sequence: Synthetic destabilizing domain (DD)
  source 1..561: mol_type = other DNA
gtgggctccctgaactgcatcgtggccgtgagccagaacatgggcatcggcaagaatggcgacctgccttggccacctctgaggaacgagttcagatactttcagaggatgaccacaaccagctccgtggagggcaagcagaacctggtcatcatgggcaagaagacatggttctctatccccgagaagaaccgccctctgaagggccggatcaatctggtgctgagcagagagctgaaggagccaccacagggagcacacttcctgagccggagcctggacgatgccctgaagctgaccgagcagcccgagctggccaacaaggtggacatggtgtggatcgtgggcggctctagcgtgatcaaggagttcatgaatcacccaggccacctgaagctgttcgtgacaagaatcatgcaggactttgagtccgataccttctttcccgagatcgacctggagaagtacaagctgctgcctgagtatccaggcgtgctgtctgatgtgcaggaggagaagggcatcaagtacaagttcgaggtgtatgagaagaatgattga

SEQ ID NO: 78 - DNA, 561 bp, synthetic construct
  misc_feature 1..561: note = Description of Artificial Sequence: Synthetic destabilizing domain (DD)
  source 1..561: mol_type = other DNA
atggttggttcgctaaactgcatcgtcgctgtgtcccagaacatgggcatcggcaagaacggggacctgccctggccaccgctcaggaatgaattcagatatttccagagaatgaccacaacctcttcagtagaaggtaaacagaatctggtgattatgggtaagaagacctggttctccattcctgagaagaatcgacctttaaagggtagaattaataacgttctcagcagagaactcaaggaacctccacaaggagctcattttctttccagaagtctagatgatgccttaaaacttactgaacaaccagaattagcaaataaagtagacatggtctggatagttggtggcagttctgttattaaggaagccatgaatcacccaggccatcttaaactatttgtgacaaggatcatgcaagactttgaaagtgacacgttttttccagaaattgatttggagaaatataaacttctgccagaatacccaggtgttctctctgatgtccaggaggagaaaggcattaagtacaaatttgaagtatatgagaagaatgat

SEQ ID NO: 79 - DNA, 561 bp, synthetic construct
  misc_feature 1..561: note = Description of Artificial Sequence: Synthetic destabilizing domain (DD)
  source 1..561: mol_type = other DNA
atggttggttcgctaaactgcatcgtcgctgtgtcccagaacatgggcatcggcaagaacggggacctgccctggccaccgctcaggaatgaattcagatatttccagagaatgaccacaacctcttcagtagaaggtaaacagaatctggtgattatgggtaagaagacctggttctccattcctgagaagaatcgacctttaaagggtagaattaatttagttctcagcagagaactcaaggaacctccacaaggagctcattttctttccagaagtgcagatgatgccttaaaacttactgaacaaccagaattagcaaataaagtagacatggtctggatagttggtggcagttctgtttataaggaagccatgaatcacccaggccatcttaaactatttgtgacaaggatcatgcaagactttgaaagtgacgcgttttttccagaaattgatttggagaaatataaacttctgccagaatacccaggtgttctctctgatgtccaggaggagaaaggcattaagtacaaatttgaagtatatgagaagaatgat

SEQ ID NO: 80 - DNA, 561 bp, synthetic construct
  misc_feature 1..561: note = Description of Artificial Sequence: Synthetic destabilizing domain (DD)
  source 1..561: mol_type = other DNA
atggttggttcgctaaactgcatcgtcgctgtgtcccagaacatgggcatcggcaagaacacggacctgccctggccaccgctcaggaatgaattcagatatttccagagaatgaccacaacctcttcagtagaaggtaaacagaatctggtgattatgggtaagaagacctggttctccattcctgagaagaatcgacctttaaagggtagaattaatttagttctcagcagagaactcaaggaacctccacaaggagctcattttctttccagaagtctagatgatgccttaaaacttactgaacaaccagaattagcaaataaagtagacatggtctggatagttggtggcagttctgttattaaggaagccatgaatcacccaggccatcttaaactatttgtgacaaggatcatgcaagactttgaaagtgacacgttttttccagaaattgatttggagaaatataaacttctgccagaatacccaggtgttctctctgatgtccaggaggagaaaggcattaagtacaaatttgaagtatatgagaagaatgat

SEQ ID NO: 81 - DNA, 561 bp, synthetic construct
  misc_feature 1..561: note = Description of Artificial Sequence: Synthetic destabilizing domain (DD)
  source 1..561: mol_type = other DNA
atggttggttcgctaaactgcatcgtcgctgtgtcccagaacatgggcatcggcaagaacggggacctgccctggccaccgctcaggaatgaattcagatatttccagagaatgaccacaacctcttcagtagaaggtaaacagaatctggtgattatgggtaagaagacctggttctccattcctgagaagaatcgacctttaaagggtagaattaatttagttctcagcagagaactcaaggaacctccacaaggagctcattttctttccagaagtctagatgatgccttaaaacttactgaacaaccagaattagcaaataaagtagacatggtctggatagttggtggcagttctgctattaaggaagccatgaatcacccaggccatcttaaactatttgtgacaaggatcatgcaagactttgaaagtgacacgttttttccagaaattgatttggagaaatataaacttctgccagaatacccaggtgttctctctgatgtccaggaggagaaaggcattaagtacaaatttgaagtatatgagaagaatgat

SEQ ID NO: 82 - DNA, 561 bp, synthetic construct
  misc_feature 1..561: note = Description of Artificial Sequence: Synthetic destabilizing domain (DD)
  source 1..561: mol_type = other DNA
atggttggttcgctaaactgcatcgtcgctgtgtcccagaacatgggcatcggcaagaacggggacctgccctggccaccgctcaggaatgaattcagatatttcaagagaatgaccacaacctcttcagtagaaggtaaacagaatctggtgattatgggtaagaagacctggttctccattcctgagaagaatcgacctttaaagggtagaattaatttagttctcagcagagaactcaaggaacctccacaaggagctcattttctttccagaagtctagatgatgccttaaaacttactgaacaaccagaattagcaaataaagtagacatggtctggatagttggtggcagttctgttattaaggaagccatgaatcacccaggccatcttaaactatttgtgacaaggatcatgcaagactttgaaagtgacacgttttttccagaaattgatttggagaaatataaacttctgccagaatacccaggtgttctctctgatgtccaggaggagaaaggcattaagtacaaatttgaagtatatgagaagaatgat

SEQ ID NO: 83 - DNA, 561 bp, synthetic construct
  misc_feature 1..561: note = Description of Artificial Sequence: Synthetic destabilizing domain (DD)
  source 1..561: mol_type = other DNA
gtgggctccctgaactgcatcgtggccgtgagccagaacatgggcatcggcaagaatggcgacctgccttggccacctctgaggaacgagttcagatactttaagaggatgaccacaaccagctccgtggagggcaagcagaacctggtcatcatgggcaagaagacatggttctctatccccgagaagaaccgccctctgaagggccggatcaatctggtgctgagcagagagctgaaggagccaccacagggagcacacttcctgagccggagcctggacgatgccctgaagctgaccgagcagcccgagctggccaacaaggtggacatggtgtggatcgtgggcggctctagcgtgatcaaggaggccatgaatcacccaggccacctgaagctgttcgtgacaagaatcatgcaggactttgagtccgataccttctttcccgagatcgacctggagaagtacaagctgctgcctgagtatccaggcgtgctgtctgatgtgcaggaggagaagggcatcaagtacaagttcgaggtgtatgagaagaatgattga

SEQ ID NO: 84 - DNA, 561 bp, synthetic construct
  misc_feature 1..561: note = Description of Artificial Sequence: Synthetic destabilizing domain (DD)
  source 1..561: mol_type = other DNA
atggttggttcgctaaactgcatcgtcgctgtgtcccagaacatgggcatcggcaagaacggggacctgccctggccaccgctcaggaatgaattcagatatttcaagagaatgaccacaacctcttcagtagaaggtaaacagaatctggtgattatgggtaagaagacctggttctccattcctgagaagttccgacctttaaagggtagaattaatttagttctcagcagagaactcaaggaacctccacaaggagctcattttctttccagaagtctagatgatgccttaaaacttactgaacaaccagaattagcaaataaagtagacatggtctggatagttggtggcagttctgttattaaggaagccatgaatcacccaggccatcttaaactatttgtgacaaggatcatgcaagactttgaaagtgacacgttttttccagaaattgatttggagaaatataaacttctgccagaatacccaggtgttctctctgatgtccaggaggagaaaggcattaagtacaaatttgaagtatatgagaagaatgat

SEQ ID NO: 85 - DNA, 561 bp, synthetic construct
  misc_feature 1..561: note = Description of Artificial Sequence: Synthetic destabilizing domain (DD)
  source 1..561: mol_type = other DNA
gtgggctccctgaactgcatcgtggccgtgagccagaacatgggcatcggcaagaatggcgacctgccttggccacctctgaggaacgagttcagatactttttcaggatgaccacaaccagctccgtggagggcaagcagaacctggtcatcatgggcaagaagacatggttctctatccccgagaagttccgccctctgaagggccggatcaatctggtgctgagcagagagctgaaggagccaccacagggagcacacttcctgagccggagcctggacgatgccctgaagctgaccgagcagcccgagctggccaacaaggtggacatggtgtggatcgtgggcggctctagcgtgatcaaggaggccatgaatcacccaggccacctgaagctgttcgtgacaagaatcatgcaggactttgagtccgataccttctttcccgagatcgacctggagaagtacaagctgctgcctgagtatccaggcgtgctgtctgatgtgcaggaggagaagggcatcaagtacaagttcgaggtgtatgagaagaatgattga

SEQ ID NO: 86 - DNA, 558 bp, synthetic construct
  misc_feature 1..558: note = Description of Artificial Sequence: Synthetic destabilizing domain (DD)
  source 1..558: mol_type = other DNA
gtgggcagcctgaactgtatcgtggccgtgtcccagaacatgggcatcggcaagaatggcgatctgccatggccccctctgcggaacgagttcagatacttctttaggatgaccacaaccagctccgtggagggcaagcagaacctggtcatcatgggcaagaagacctggttttctatccccgagaagaacagacctctgaagggcaggatcaatctggtgctgagcagagagctgaaggagccaccacagggagcacacttcctgagccggagcctggacgatgccctgaagctgacagagcagccagagctggccaacaaggtggacatggtgtggatcgtgggcggctctagcgtgatcaaggagtttatgaatcaccccggccacctgaagctgttcgtgaccagaatcatgcaggactttgagtccgatacattctttcctgagatcgatctggagaagtacaagctgctgccagagtatcccggcgtgctgtctgacgtgcaggaggagaagggcatcaagtacaagttcgaggtgtatgagaagaacgat

SEQ ID NO: 87 - DNA, 558 bp, synthetic construct
  misc_feature 1..558: note = Description of Artificial Sequence: Synthetic destabilizing domain (DD)
  source 1..558: mol_type = other DNA
gttggttcgctaaactgcatcgtcgctgtgtcccagaacatgggcatcggcaagaacggggacctgccctggccaccgctcaggaatgaattcagatatttccagagaatgaccacaacctcttcagtagaaggtaaacagaatctggtgattacgggtaagaagacctggttctccattcctgagaagaatcgacctttaaagggtagaattaatttagttctcagcagagaactcaaggaacctccacaaggagctcattttctttccagaagtctagatgatgccttaaaacttactgaacaaccagaattagcaaataaagtagacatggtctggatagttggtggcagttctgtttataaggaagccatgaatcacccaggccatcttaaactatttgtgacaatcatcatgcaagactttgaaagtgacacgttttttccagaaattgatttggagaaatataaacttctgccagaatacccaggtgttctctctgatgtccaggaggagaaaggcattaagtacaaatttgaagtatatgagaagaatgat

SEQ ID NO: 88 - DNA, 558 bp, synthetic construct
  misc_feature 1..558: note = Description of Artificial Sequence: Synthetic destabilizing domain (DD)
  source 1..558: mol_type = other DNA
gttggttcgctaaactgcatcgtcgctgtgtcccagaacatgggcatcggcaagaacggggacctgccctggccaccgctcaggaatgaattcagatatttccagagaatgaccacaacctcttcagtagaaggtaaacagaatctggtgattatgggtaagaagacctggttctccattcctgagaagaatcgacctttaaagggtagaattaatttatttctcagcagagaactcaaggaacctccacaaggagctcattttctttccagaagtctagatgatgccttaaaacttactgaacaaccagaattagcaaataaagtagacatggtctggatagttggtggcagttctgttattaaggaagccatgaatcacccaggccatcttaaactatttgtgacaaggatcatgcaagactttgaaagtgacacgttttttccagaaattgatttggagaaatataaacttctgccagaatacccaggtgttctctctgatgtccaggaggagaaaggcattaagtacaaatttgaagtatatgagaagaatgat

SEQ ID NO: 89 - DNA, 558 bp, synthetic construct
  misc_feature 1..558: note = Description of Artificial Sequence: Synthetic destabilizing domain (DD)
  source 1..558: mol_type = other DNA
gttggttcgctaaactgcatcgtcgctgtgtcccagaacatgggcatcggcaagaacggggacctgccctggccaccgctcaggaatgaattcagatatttccagagaatgaccacaacctcttcagtagaaggtaaacagaatctggtgattatgggtaagaagacctggttctccattcctgagaagaatcgacctttaaagggtagaattaataacgttctcagcagagaactcaaggaacctccacaaggagctcattttctttccagaagtctagatgatgccttaaaacttactgaacaaccagaattagcaaataaagtagacatggtctggatagttggtggcagttctgttattaaggaagccatgaatcacccaggccatcttaaactatttgtgacaaggatcatgcaagactttgaaagtgacacgttttttccagaaattgatttggagaaatataaacttctgccagaatacccaggtgttctctctgatgtccaggaggagaaaggcattaagtacaaatttgaagtatatgagaagaatgat

SEQ ID NO: 90 - DNA, 561 bp, synthetic construct
  misc_feature 1..561: note = Description of Artificial Sequence: Synthetic destabilizing domain (DD)
  source 1..561: mol_type = other DNA
atggttggttcgctaaactgcatcgtcgctgtgtcccagaacatgggcatcggcaagaacggggacctgccctggccaccgctcaggaatgaattcagatatttccagagaatgaccacaacctcttcagtagaaggtaaacagaatctggtgattatgggtaagaagacctggttctccattcctgagaagaatcgacctttaaagggtagaattaatttagttctcagcagagaactcagggaacctccacaaggagctcattttctttccagaagtctagatgatgccttaaaacttactgaacaaccagaattagcaaataaagtagacatggtctggatagttggtggcagttctgtttataaggaagccatgaatcacccaggccatcttaaactatttgtgacaaggatcatgcaagactttgaaagtgacacgttttttccagaaattgatttggagaaatataaacttctgccagaatacccaggtgttctctctgatgtccaggaggagaaaggcattaagtacaaatttgaagtatatgagaagaatgat

SEQ ID NO: 91 - DNA, 561 bp, synthetic construct
  misc_feature 1..561: note = Description of Artificial Sequence: Synthetic destabilizing domain (DD)
  source 1..561: mol_type = other DNA
atggttggttcgctaaactgcatcgccgctgtgtcccagaacatgggcatcggcaagaacggggacctgccctggccaccgctcaggaatgaattcagatatttccagagaatgaccacaacctcttcagtagaaggtaaacagaatctggtgattatgggtaagaagacctggttctccattcctgagaagaatcgacctttaaagggtagaattaatttagttctcagcagagaactcaaggaacctccacaaggagctcattttctttccagaaggctagatgatgccttaaaacttactgaacaaccagaattagcaaataaagtagacatggtctggatagttggtggcagttctgtttataaggaagccatgaatcacccaggccatcttaaactatttgtgacaaggatcatgcaagactttgaaagtgacacgttttttctagaaattgatttggagaaatataaacttctgccagaatacccaggtgttctctctgatgtccaggaggagaaaggcattaagtacaaatttgaagtatatgagaagaatgat

SEQ ID NO: 92 - DNA, 561 bp, synthetic construct
  misc_feature 1..561: note = Description of Artificial Sequence: Synthetic destabilizing domain (DD)
  source 1..561: mol_type = other DNA
atggttggttcgctaaactgcatcgtcgctgtgtcccagaacatgggcatcggcaagaacggggacctgccctggccaccgctcaggaatgaattcagatatttccagagaatgaccacaacctcttcagtagaaggtaaacagaatctggtgattatgggtaagaagacctggtcctccattcctgagaagaaccgacctttaaagggtagaattaatttagttctcagcagagaactcaaggaacctccacaaggagctcattttctttccagaagtctagatgatgccttaaaacttactgaacaaccagaattagcaaataaagtagacatggtctggatagttggtggcagttctgtttataaggaagccatgaatcacccaggccatcttaaactatttgtgacaaggatcatgcaagactttgaaagtgacacgttttttccagaaattgatttggagaaatataaacttctgccagaatacccaggtgttctctctgatgtccaggaggagaaaggcattaagtacaaatttgaagtatatgagaagaatgat

SEQ ID NO: 93 - DNA, 561 bp, synthetic construct
  misc_feature 1..561: note = Description of Artificial Sequence: Synthetic destabilizing domain (DD)
  source 1..561: mol_type = other DNA
atggttggttcgctaaactgcatcgtcgctgtgtcccagaacatgggcgtcggcaagaacggggacctgccctggccaccgctcaggaatgaattcagatatttccagagaatgaccacaacctcttcagtagaaggtaaacagaatctggtgattatgggtaagaagacctggttctccattcctgagaagaatcgacctttaaagggtagaattaatttagttctcagcagagaactcaaggaacctccacaaggagctcattttctttccagaagtctagatgatgccttaaaacttactgaacaaccagaattagcaaataaagtagacatggtctggatagttggtggcagttctgtttataaggaagccatgaatcacccaggccatcttaaactatttgtgacaaggatcatgcaagactttgaaagtgacacgttttttccagaaattgatttggagaaatataaacttctgccagaatacccaggtgttctctctgatgtccaggaggagaaaggcattaagtacaaatttgaagtatatgagaagaatgat

SEQ ID NO: 94 - DNA, 561 bp, synthetic construct
  misc_feature 1..561: note = Description of Artificial Sequence: Synthetic destabilizing domain (DD)
  source 1..561: mol_type = other DNA
atggttggttcgctaaactgcatcgtcgctgtgtcccagaacatgggcatcggcaagaacggggacctgccctggccaccgctcaggaatgaattcagatatttccagagaatgaccacaacctcttcagtagaaggtaaacagaatctggtgattatgggtaagaagacctggttctccattcctgagaaggatcgacctttaaagggtagaattaatttagttctcagcagagaactcaaggaacctccacaaggagctcattttctttccagaagtctagatgatgccttaaaacttactgaacaaccagaattagcaaataaagtagacatggtctggatagttggtggcagttctgtttataaggaagccatgaatcacccaggccatcttaaactatttgtgacaaggatcatgcaagactttgaaagtgacacgttttttccagaaattgatttggagaaatataaacttctgccagaatacccaggtgttctctctgatgtccaggaggagaaaggcattaagtacaaatttgaagtatatgagaagaatgat

SEQ ID NO: 95 - DNA, 561 bp, synthetic construct
  misc_feature 1..561: note = Description of Artificial Sequence: Synthetic destabilizing domain (DD)
  source 1..561: mol_type = other DNA
atggttggttcgctaaactgcatcgttgttgtgtcccagaacatgggcatcggcaagaacggggacctgccctggccaccgctcaggaatgaattcagatatttccagagaatgaccacaacctcttcagtagaaggtaaacagaatctggtgattatgggtaagaagacctggttctccattcctgagaagaatcgacctttaaagggtagaattaatttagttctcagcagagaactcaaggaacctccacaaggagcttattttctttccagaagtctagatgatgccttaaaacttactgaacaaccagaattagcaaataaagtagacatggtctggatagttggtggcagttctgtttataaggaagccatgaatcacccaggccatcttaaactatttgtgacaaggatcatgcaagactttgaaagtgacacgttttttccagaaattgatttggagaaatataaacttctgccagaatacccaggtgttctctctgatgtccaggaggagaaaggcattaagtacaaatttgaagtatatgagaagaatgat

SEQ ID NO: 96 - DNA, 561 bp, synthetic construct
  misc_feature 1..561: note = Description of Artificial Sequence: Synthetic destabilizing domain (DD)
  source 1..561: mol_type = other DNA
atggttggttcgctaaactgcatcgtcgctgtgtcccagaacatgggcatcggcaagaacggggacctgccctggccaccgctcaggaatgaattcagatatttccagagaatgaccacaacctcttcagtagaaggtaaacagaatctggtgattatgggtaagaagacctggttctccattcctgagaagaatcgacctttaaagggtagaattaatttagttctcagcagagaactcaaggaacctccacaaggagctcattttctttccaggagtctagatgatgccttaaaacttactgaacaaccagaattagtaaataaagtagacatggtctggatagttggtggcagttctgtttataaggaagccatgaatcacccaggccatcttaaactatttgtgacaaggatcatgcaagactttgaaagtgacacgttttttccagaaattgatttggagaaatataaacttctgccagaatacccaggtgttctctctgatgtccaggaggagaaaggcattaagtacaaatttgaagtatatgagaagaatgat

SEQ ID NO: 97 - DNA, 561 bp, synthetic construct
  misc_feature 1..561: note = Description of Artificial Sequence: Synthetic destabilizing domain (DD)
  source 1..561: mol_type = other DNA
atggttggttcgctaaaccgcatcgtcgctgtgtcccagaacatgggcatcggcaagaacggggacctgccctggccaccgctcaggaatgaattcagatatttccagagaatgaccacaacctcttcagtagaaggtaaacagaatctggtgattatgggtaagaagacctggttctccattcctgagaagaatcgacctttaaagggtagaattaatttagttctcagcagagaactcaaggaacctccacaaggagctcattttctttccagaagtctagatgatgccttaaaacttactgaacaaccagaattagcaaataaagtagacatggtctggatagttggtggcagttctgtttataaggaagccatgaatcacccaggccatcttaaactatttgtgacaaggatcatgcaagactttgaaagtgacacgttttttccagaaattgatttggagaaatataaacttctgccagaatgcccaggtgttctctctgatgtccaggaggagaaaggcattaagtacaaatttgaagtatatgagaagaatgat

SEQ ID NO: 98 - DNA, 561 bp, synthetic construct
  misc_feature 1..561: note = Description of Artificial Sequence: Synthetic destabilizing domain (DD)
  source 1..561: mol_type = other DNA
atggttggttcgctaaactgcatcgtcgctgtgtcccagaacatgggcatcggcaagaacggggacctgccctggccaccgctcaggaatgaattcagatatttccagagaatgaccacaacctcttcagtagaaggtaaacagaatctggtgattatgggtaagaagacctggttctccattcctgagaagaatcgacctttaaagggtagaattaatttagttctcagcagagaactcaaggaacctccacaaggagctcattttctttccagaagtctagatgatgccttaaaacttactgaacaaccagaattagcaaataaagtagacatggtctggatagttggtggcagttctgtttataaggaagccatgtatcacccaggccatcttaaactatttgtgacaaggatcatgcaagactttgaaagtgacacgttttttccagaaattgatttagagaaatataaacttctgccagaatacccaggtgttctctctgatgtccaggaggagaaaggcattaagtacaaatttgaagtatatgagaagaatgat

SEQ ID NO: 99 - DNA, 561 bp, synthetic construct
  misc_feature 1..561: note = Description of Artificial Sequence: Synthetic destabilizing domain (DD)
  source 1..561: mol_type = other DNA
atggttggttcgctaaactgcatcgtcgctgtgtcccagaacatgggcatcggcaagaacggggacctgccctggccaccgctcaggaatgaattcagatatttccagagaatgaccacaacctcttcagtagaaggtaaacagaatctggtgattatgggtaagaagacctggttctccattcctgagaagaatcgacctttaaagggtagaattaatttagttctcagcagagaactcaaggaacctccacaaggagctcattttctttccagaagtctagatgatgccttaaaacttactgaacaaccagaattagcaaataaagtagacatggtctggatagttggtggcagttctgtttataaggaagccatgaatcacccaggccatcttaaactatttgtgacaaggatcatgcaagactttgaaagtgacacgttttttccagaaattgatttggagaaatataaacttctgccagaatacccaggtgttctctctgatgtccaggaggagaaaggcattaagtacaaatttgaagtatatgaggagaatgat

SEQ ID NO: 100 - DNA, 561 bp, synthetic construct
  misc_feature 1..561: note = Description of Artificial Sequence: Synthetic destabilizing domain (DD)
  source 1..561: mol_type = other DNA
atggttggttcgctaaactgcatcgtcgctgtgtcccagaacatgggcatcggcaagaacggggacctgccctggccaccgctcaggaatgaattcagatacttccagagaatgaccacaacctcttcagtagaaggtaaacagaatctggtgattatgggtaagaagacctggttctccattcctgagaagaatcgacctttaaagggtagaattaatttagttctcagcagagaactcaaggaacctccacaaggagctcattttctttccagaagtctagatgatgccttaaaacttactgaacaaccagaattagcaaataaagtagacatggtctggatagttggtggcagttctgtttataaggaagccatgaatcacccaggccatcttaaactatttgtgagaaggatcatgcaagaccttgaaagtgacacgttttttccagaaattgatttggagaaatataaacttctgccagaatacccaggtgttctctctgatgtccaggaggagaaaggcattaagtacaaatttgaagtatatgagaagaatgat

SEQ ID NO: 101 - DNA, 561 bp, synthetic construct
  misc_feature 1..561: note = Description of Artificial Sequence: Synthetic destabilizing domain (DD)
  source 1..561: mol_type = other DNA
atggttggttcgctaaactgcgtcgtcgctgtgtcccagaacatgggcatcggcaagaacggggacctgccctggccaccgctcaggaatgaattcagatatttccagagaatgaccacaacctcttcagtagaaggtaaacagaatctggtgattatgggtaagaagacctggttctccattcctgagaagaatcgacctttaaagggtagaattaatttagttctcagcagagaactcaaggaacctccacaaggagctcattttctttccagaagtctagatgatgccttaaaacttactgaacaaccagaattagcaaataaagtagacatggtctggatagttggtggcagttctgtttataaggaagccatgaatcacccaggccatcttgaactatttgtgacaaggatcatgcaagactttgaaagtgacacgttttttccagaaattgatttggagaaatataaacttctgccagaatgcccaggtgttctctctgatgtccaggaggagaaaggcattaagtacaaatttgaagtatatgagaagaatgat

SEQ ID NO: 102 - DNA, 561 bp, synthetic construct
  misc_feature 1..561: note = Description of Artificial Sequence: Synthetic destabilizing domain (DD)
  source 1..561: mol_type = other DNA
atggttggttcgctaaactgcatcgtcgctgtgtcccagaacatgggcatcggcgagaacggggacctgccctggccaccgctcaggaatgaattcagatatttccagagaatgaccacaacctcttcagtagaaggtaaacagaatctggtgattatgggtaagaagacctggttctccattcctgagaagaatcgacctttaaagggtagaattaatttagttctcagcagagaactcaaggaacctccacaaggagctcatcttctttccagaagtctagatgatgccttaaaacttactgaacaaccagaattagcaaataaagtagacatggtctggatagttggtggcagttctgtctataaggaagccatgaatcacccaggccatcttaaactatttgtgacaaggatcatgcaagactttgaaagtgacacgttttttccagaaattgatttggagaaatataaacttctgccagaatacccaggtgttctctctgatgtccaggaggagaaaggcattaagtacaaatttggagtatatgagaagaatgat

SEQ ID NO: 103 - DNA, 561 bp, synthetic construct
  misc_feature 1..561: note = Description of Artificial Sequence: Synthetic destabilizing domain (DD)
  source 1..561: mol_type = other DNA
atggttggttcgctaaactgcatcgtcgctgtgtcccagaacatgggcatcggcaagaacggggacctgccctggccaccgctcaggaatgaattcagatatttccagagaatgaccacaacctcttcagtagaaggtaaacagaatctggtaattatgggtaagaagacctggttctccattcctgagaagaatcgacctttaaagggtagaattaatttagttctcagcagagaactcaaggaacctccacaaggagctcattttctttccagaagtctagatgatgccttaaaacttactgaacaaccagaattagcaaataaagtagacatggtctggatagttggtggcagttctgtttataaggaagccatgaatcacccaggccatcttaaactatttgtgacaaggatcatgcaagactttgaaagtgacacgttttttccagaaattgatttggagaaatataaacttctgccagaatacccaggtgttctctctgatgtccaggaggagaaaggcattaagtacaaatttgaggtatatgagaaggatgat

SEQ ID NO: 104 - DNA, 561 bp, synthetic construct
  misc_feature 1..561: note = Description of Artificial Sequence: Synthetic destabilizing domain (DD)
  source 1..561: mol_type = other DNA
atggttggttcgctgaactgcatcgtcgctgtgtcccagaacatgggcatcggcaagaacggggacctgccctggccaccgctcaggaatgaattcagatatttccagagaatgaccacaacctcctcagtagaaggtaagcagaatctggtgattatgcgtaagaagacctggttctccattcctgagaagaatagacctttaaagggtagaattaatttagttctcagcagagaactcaaggaacctccacaaggagcccattttctttccagaagtctagatgatgccttaaaacttactgaacaaccagaattagcaaataaagtagacatggtctggttagttggtggcagttctgtttataaggaagccatgaatcacccaggccatcttaaactatttgtgacaaggatcgtgcaagactttgaaagtgacacgttttttccagaaattgatttggagaaatataaacttctgccagaatacccaggtgttctctgtgatgtccaggaggagaaaggcattaagtacaaatttgaggtatatgagaagaatgat

SEQ ID NO: 105 - DNA, 561 bp, synthetic construct
  misc_feature 1..561: note = Description of Artificial Sequence: Synthetic destabilizing domain (DD)
  source 1..561: mol_type = other DNA
atggttggctcgctaaactgcatcgtcgctgtgtcccagaacatgggcatcggcaagaacggggactcgccctggccaccgctcaggaatgaattcagatatttccagagaatgaccacaacctcttcagtagaaggtaaacagaatctggtgattatgggtaagaagacctggttctccattcctgagaagaatcgacctttaaagggtagaattaatttagttctcagcagagaactcaaggaacctccacaaggagctcattttctttccagaagtctagatgatgccttaaaacttactgaacaaccagaattagcaaataaagtagacatggtctggatagttggtggcagttctgcttataaggaagccatgaatcacccaggccatcttaaactatttgtgacaaggatcatgcaagactttgaaagtgacacgttttttccagaaattgatttggagaaatgtaaacttctgccagaatacccaggtgttctctctgatgtccaggaggagaaaggcattaagtacaaatttgaagtatatgagaagaatgat

SEQ ID NO: 106 - DNA, 561 bp, synthetic construct
  misc_feature 1..561: note = Description of Artificial Sequence: Synthetic destabilizing domain (DD)
  source 1..561: mol_type = other DNA
atggttggttcgctaaactgcatcgtcgctgtgtcccagaacatgggcatcggcaagaacggggacctgccctggccaccgctcaggaatgaattcagatacttccagagaatgaccacaacctcttcagtagaaggtaaacagaatctggtgattatgggtaagaagacctggttctccattcctgagaagaatcgacctttaaagggtagaattaatttagtcctcagcagagaactcaaggaacctccacaaggagctcattttctttccagaagtctagatgatgccttaaaacttactgaacaaccagaattagcaaataaagcagacatggtctggatagttggtggcagttctgtttataaggaagccatgaatcacccaggccatcttaaactatttatgacgaggatcatgcaagactttgaaagtgacacgttttttccagaaattgacctggagaaatataaactcctgccagaatacccaggtgttctctctgatgtccaggaggagaaaggcattaggtacaaatttgaagtatatgagaagaatgat

SEQ ID NO: 107 - DNA, 561 bp, synthetic construct
  misc_feature 1..561: note = Description of Artificial Sequence: Synthetic destabilizing domain (DD)
  source 1..561: mol_type = other DNA
atggttggttcgctaaactgcatcgtcgctgtgtcccagaacatgggcatcggcaagaacggggacctgccctggccaccgctcaggaatgaattcagatatttccagagaatgaccacaacctcttcagtagaaggtaaacagaatctggtgattatgggtaagaagacctggttctccattcctgagaagaatcgacctttaaagggtagaattaatttagttctcagcagagaactcaaggaacctccacaaggagctcattttctttccagaagtctagatgatgccttaaaacttactgaacaaccagaattagcaaataaagtagacatggtctggatagttggtggcagttctgtttataaggaagccatgaatcacccaggccatcttaaactatttgtgacaaggatcatgcaagactttgaaagtgacacgttttttccagaaattgatttggagaaatataaacttctgccaggatacccaggtgttctctctgatgtccaggaggagaaaggctttaagtacaaatttgaagtatatgagaagaatgat

SEQ ID NO: 108 - DNA, 561 bp, synthetic construct
  misc_feature 1..561: note = Description of Artificial Sequence: Synthetic destabilizing domain (DD)
  source 1..561: mol_type = other DNA
atggttggttcgctaaactgcatcgtcgctgtgtcccagaacatgggcatcggcaagaacggggacctgccctggccaccgctcaggaatgaattcagatatttccagagaatgaccacaacctcttcagtagaaggtaaacagaatctggtgattatgggtaagaagacctggttctccattcctgagaagaatcgacctttaaagggtagaattaatttagttctcagcagagaactcaaggaacctccacaaggagctcattttctttccagaagtctagatgatgccttaaaacttactgaacaaccagaattagcaaataaagtagacatggtctggatagttggtggcagttctgtttataaggaagccatgaatcacccaggccatcttaaactatttgtgacaaggatcatgcaagactttgaaagtgacacgttttttccagaaattgatttggagaaatataaacttctgccagaatacccaggtgttctctctgatgtccaggaggagaaaggcattaagcacaaatttggagtatatgagaagaatgat

SEQ ID NO: 109 - DNA, 561 bp, synthetic construct
  misc_feature 1..561: note = Description of Artificial Sequence: Synthetic destabilizing domain (DD)
  source 1..561: mol_type = other DNA
atggttggttcgctaaactgcatcgtcgctgtgtcccagaacatgggcatcggcaagaacggggacctgccctggccaccgctcaggaatgaattcagatatttccagagaatgaccacaacctcttcagtagaaggtaaacaggatctggtgattatgggtaagaagacctggtcctccattcctgagaagaatcgacctttaaagggtagaattaatttagttctcagcagagaactcaaggaacctccacaaggagctcattttctttccagaagtctagatgatgccttaaaacttactgaacaaccagaattagcaaataaagtagacatggtctggatagttggtggcagttctgtttataaggaagccatgaatcacccaggccatcttaaactgtttgtgacaaggatcatgcaagactttgaaagtgacacgttttttccagaaattggtttggagaaatataaacttctgccagaatacccaggtgttctctctgatgtccaggaggagaaaggcattaagtacaaatttgaagtatatgagaagaatgat

SEQ ID NO: 110 - DNA, 561 bp, synthetic construct
  misc_feature 1..561: note = Description of Artificial Sequence: Synthetic destabilizing domain (DD)
  source 1..561: mol_type = other DNA
atggttggttcgctaaactgcatcgtcgctgtgtcccagaacatgggcatcggcaagaacggggacctgccctggccaccgctcaggaatgaattcagatatttccagagaatgaccacaacctcttcagtagaaggtaaacagaatctggtgattatgggtaagaagacctggttctccattcctgagaagaatcgacctttaaagggtagaattaatttagttctcagcagagaactcaaggaacctccacaaggagctcattttctttccagaagtctagatgatgccttaaaacttactgaacaaccagaattagcaaataaagtagacatggtctggatagttggtggcagttctgtttataaggaagccatgaatcacccaggccatcttaaactatttgtgacaaggatcatacaagactttgaaagtgacacgttttttccagaaattgatttggagaaatataaacttctgccagaatacccaggtgttctctctgatgtccaggaggagaaaggcattaagtacaaatttgaagtatatgagaagaatgat

SEQ ID NO: 111 - DNA, 561 bp, synthetic construct
  misc_feature 1..561: note = Description of Artificial Sequence: Synthetic destabilizing domain (DD)
  source 1..561: mol_type = other DNA
atggttggttcgctaaactgcatcgtcgctgtgtcccagaacatgggcatcggcaagaacggggacctgccctggccaccgctcaggaatgaattcagatatttccagaggatgaccacaacctcttcagtagaaggtaaacagaatctggtgattatgggtaagaagacctggttctccattcctgagaagaatcgacctttaaagggtagaattaatttagttcttagcagagaactcaaggaacctccacaaggagctcattttctttccagaagtttagatgatgccttaaaacttactgaacaaccagaattagcaaataaagtagacatggtctggatagttggtggcagttctgtttataaggaagccatgaatcacccaggccgtcttaaactatttgtgacaaggatcatgcaagactttggaagtgacacgttttttccagaaattgatttggagaaatataaacttctgccagaatacccaggtgttctctctgatgtccaggaggagaaaggcattaagtacaaatttgaagtatatgagaagaatgat

SEQ ID NO: 112 - DNA, 561 bp, synthetic construct
  misc_feature 1..561: note = Description of Artificial Sequence: Synthetic destabilizing domain (DD)
  source 1..561: mol_type = other DNA
atggttggttcgctaaactgcatcgtcgctgtgtcccagaacatgggcatcggcaagaacggggacctgccctggccaccgctcaggaatgaattcagatatttccagagaatgaccacaacctcttcggtagaaggtaaacagaatctggtgattatgggtaagaaggcctggttctccattcctgagaagaatcgacctttaaagggtagagctaatttagttctcagcagagaactcaaggaacctccacaaggagctcattttctttccagaagtctagatgatgccttaaaacttactgaacaaccagaattagcaaataaagtagacatggtctggatagttggtggcagttctgtttataaggaagccatgaatcacccaggccatcttaaactatttgtgacaaggatcatgcaagactttgaaagtgacacgttttttccagaaattgatttggagaaatataaacttctgccagaatacccaggtgttctctctgatgtccaggaggagaaaggcattaagtacaaatttgaagtatatgagaagaatgat

SEQ ID NO: 113 - DNA, 561 bp, synthetic construct
  misc_feature 1..561: note = Description of Artificial Sequence: Synthetic destabilizing domain (DD)
  source 1..561: mol_type = other DNA
atggttggttcgctaaactgcatcgtcgctgtgtcccagaacatgggcatcggcaagaacggggacctgccctggccaccgctcaggaatgaattcagatatttccagagaatgaccacaacctcttcagtagaaggtaaacagaatctggtgattatgggtaagaagacctggttctccattcctgagaagaatcgacctttaaagggtagaattaatttagttctcagcagagaactcaaggagcctccacaaggagctcattttctttccagaagtctagatgatgccttaaaacttactgaacaaccagaattagcaaataaagtagacatggtctggatagttggtggcagttctgtttataaggaagccatgaatcacccaggccatcttaaactatttgtgacaaggatcatgcaagacttcgaaagtgacacgttttttccagaaattgatttggagaaatataaacttctgccagaatacccaggtgttctctctgatgtccaggaggagaaaggcattaagtacaaatttgaagtacatgaggagaatgat

SEQ ID NO: 114 - DNA, 561 bp, synthetic construct
  misc_feature 1..561: note = Description of Artificial Sequence: Synthetic destabilizing domain (DD)
  source 1..561: mol_type = other DNA
atggttggttcgctaaactgcatcgtcgctgtgtcccagaacatgggcatcggcaagaacgaggacctgccctggccaccgctcaggaatgaattcagatatttccagagaatgaccacaacctcttcagtagaaggtaaacagaatctggtgattatgggtaagaagacctggttctccattcctgagaagaatcgacctttaaagggtagagttaatttagttcttagcagagaactcaaggaacctccacaaggagctcattttctttccagaagtctagatgatgccttaaaacttactgaacaaccagaattagcaaataaagtagacatggtctggatagttggtggcagttccgtttataaggaagccatgaatcacccaggccatcttaaactatttgtgacaaggatcatgcaagactttgaaagtgacacgttttttccagaaattgatttggagaaatataaacttctgccagaatacccaggcgttctctctgatgtccaggaggagaaaggcactaagtacaaatttgaagtatatgagaagaatgat

SEQ ID NO: 115 - DNA, 561 bp, synthetic construct
  misc_feature 1..561: note = Description of Artificial Sequence: Synthetic destabilizing domain (DD)
  source 1..561: mol_type = other DNA
atggttggttcgctaaactgcatcgtcgctgtgtcccagaacatgggcatcggcaagaacggggacctgccctggccaccgctcaggaatgaattcagatatttccagagaatgaccacaacctcttcagtagaaggtaaacagaatctggtgattatgggtaagaagacctggttctccattcctgagaagaatcgacctttaaagggtagaattaatttagttctcagcagagaactcaaggaacctccacaaggagcccattttctctccagaagtctggatgatgccctaaaacctactggacgatcaggattagcagataaagtagacatggcccggatagttggcggcagctctgtttgtaaggaagccataaggtacccaggccaccctaagctacctgtgacaaggaccatgcaagactttgaaagtgacacgtctcttccagaagttgccttggagaagtataagcttctgccagaatacccaggtgtgctctctggtgcccaggaggagaagggcgctaggtacaagtttgaagcatacgaaaggagtgat

SEQ ID NO: 116 - DNA, 561 bp, synthetic construct
  misc_feature 1..561: note = Description of Artificial Sequence: Synthetic destabilizing domain (DD)
  source 1..561: mol_type = other DNA
atggctggttcgctaaactgcatcgtcgctgtgtcccagaacatgggcatcggcaagaacggggacctgccctggccaccgctcaggaatgaattcggatatttccggagaatgaccacaacctcttcagtagaaggtaaacagaatctggtgattatgggtaagaagacctggttctccattcctgagaagaatcgacctttaaagggtagaattaatttagttctcagcagagaactcaaggaacctccacaaggagctcattttctttccagaagtctagatgatgccttaaaacctactgaacaaccagaattagcaaataaagtagacatggtctggatagttggtggcagttctgtttataaggaagccatgaatcacccaggccatcttaaactatttgtgacaaggatcatgcaagactttgaaagtgacacgttttttccagaaattgatttggagaaatataaacttctgccagaatacccaggtgttctctctgatgtccaggaggagaagggcattaagtacaaatttgaagtatatgagaggaatgat

SEQ ID NO: 117 - DNA, 561 bp, synthetic construct
  misc_feature 1..561: note = Description of Artificial Sequence: Synthetic destabilizing domain (DD)
  source 1..561: mol_type = other DNA
atggttggttcgctaaactgcatcgtcgctgtgtcccagaacatgagcgtcggcaagaacggggacctgccctggccaccgctcaggaatgaattcagatattttcagagaatgaccacaacctcttcagtagaaggtaaacagaatctggtgattatgggtaagaagacctggttctccattcctgagaagaatcgacctttaaagggtagaattaatttagttctcagcagagaactcaaggaacctccacaaggagctcatcttctttccagaagtctagatggtgccttaaaacttactgagcaaccagaattagcaaataaagtagacatggtctggatagttggtggcagttctgtttatgaggaagccatgaatcacccaggccatcttaaactatttgtgacaaggatcgtgcaagactttgagagtggcacgtttttcccagaaattgatttggagagatataaacttctgccagaatacccaggtgttctctctgatgtccaggaggagaaaggcattaagtacaaatttgaagtatatgagaagaatgat

SEQ ID NO: 118 - DNA, 561 bp, synthetic construct
  misc_feature 1..561: note = Description of Artificial Sequence: Synthetic destabilizing domain (DD)
  source 1..561: mol_type = other DNA
atggttggttcgctaaactgcatcgtcgctgtgtcccagaacatgggcatcggcaagaacggggacctgccctggccaccgctcaggaatgaattcagatatctccagggaatgaccacaacctcttcagtagaaggtaaacagaatctggtgattatgggtaagaagacctggttctccattcctgagaaggctcgaccttcagagggtggaattaatttagttctcagtagagaacccaaggaacctccacaaggagctcatttcctttccagaagtctagatgatgccttaggacttactgaacaaccggaattagcaaataaagtagacatggtctggatagttgatggcagctctgtttataaggaagccatgaatcacccaggccaccctaaactatttgtgacaagggtcatacaaggctttgaaagtggcacgttttttccagaaattgatttggagaaatataaacttctgccagaatacccaggtgttctctctgacgtccaggaggggaaaggcattaagtacaaatttgaagtatatgagaagaatggt

SEQ ID NO: 119 - DNA, 561 bp, synthetic construct
  misc_feature 1..561: note = Description of Artificial Sequence: Synthetic destabilizing domain (DD)
  source 1..561: mol_type = other DNA
atggttggttcgctaaactgcatcgtcgctgtgtcccagaacatgggcaacggcaagaacggggacctgccctggccaccgctcaggaatgaattcagatatttccagagaatgaccacaacctcttcagtagaaggtaaacagaatctggtgattatgggtaagaagacctggttctccattcctgagaagaatcgacctttaaagggtagaattaatttagttctcagcagagaactcaaggaacctccacaaggagctcattttctttccagaagtctggatgatgcctcaagacttactgaacaaccagaattagccaataaagtagacacagtctggatagttggtggcagttctgtttataaggaagccatgaatcacccaggccatcttaaactatttgtgacaaggatcatgcaagactttgaaagtgacacgttttttccaggaattgatttggagaaatataaacttctgccaggatacccaggtgttctctctgatgtccagggggagaaaggcattaagtacaaatttgaagtatatgagaagaatgat

SEQ ID NO: 120 - DNA, 561 bp, synthetic construct
  misc_feature 1..561: note = Description of Artificial Sequence: Synthetic destabilizing domain (DD)
  source 1..561: mol_type = other DNA
atggttggttcgctaaactgcatcgtcgctgtgtcccagaacatgggcatcggcaagaacggggacctgccctggccaccgctcaggaatgaattcagatatttccagagaatgaccacaacctcttcagtagaaggtaaacagaatctggtgattatgggtaagaagacctggttctccattcctgagaagaatcgacctttaaagggtagaattaatttagttctcagcagagaactcaaggaacctccacaaggagctcattttctttccagaagtctagatgatgccttaaaacttactgaacaaccagaattagcaaataaagtagacatggtctggatagttggtggcagttctgtttataaggaagccatgaatcacccaggccatcttaaactatttgtgacagggatcatgcaaggctctgaaagtgacacgttttttccagaaattgatttggagagatatgaacttctgccaggatacccaggtgctctctctgatgttcaggaggagaaaggcattgagtgcaaatttgaagtatatgaggagagtgac

SEQ ID NO: 121 - DNA, 561 bp, synthetic construct
  misc_feature 1..561: note = Description of Artificial Sequence: Synthetic destabilizing domain (DD)
  source 1..561: mol_type = other DNA
atggttggttcgctaaactgcatcgtcgctgtgtcccagaacatgggcatcggcaagaacggggacctgccctggccaccgctcaggaatgaattcagatatttccagagaatgaccacaacctcttcagtagaaggtaaacagaatctggtgattatgggtaagaagacctggttctccattcctgagaagaatcgacctttaaagggtagaattaatttagttctcagcagagagctcagggaacctccacaaggagctcattttctttccagaagtctagatgatgccttaagacctactggacaaccagaattagcagataaagtagacatggtctggatagttggtggcagttctgtttatagggaagccatgaatcgcccaggccatcttaaactgtttgtaacaaggatcatgcaaggctttgaaagtgacacgttttttccagaaattgatttggagaaatataagcttctgccagaatacccaggtgttctctctgatgtccaggaggagaaaggcattaagtacaaacttgaagtgtatgaggagaatgat

SEQ ID NO: 122 - DNA, 561 bp, synthetic construct
  misc_feature 1..561: note = Description of Artificial Sequence: Synthetic destabilizing domain (DD)
  source 1..561: mol_type = other DNA
atggttggttcgctaaactgcatcgtcgctgtgtcccagagcatgggcatcggcaagaacggggacctgtcctggccaccgctcaggaatgaattcagatatctccagagaatgaccacaacctcttcagtagaaggtaaacagaatctggtgattacgggtaaggagacctggttctccattcctgagaagaatcgacctttaaagggtagaatcaatttagtcctcagcagagagctcaaggaacctccacaaggagctcattttctttccgggggtctagatgatgccttaaaacttactgaacaaccagaattagcaaataaagtagacatggtctggatagttggtggcagttctgtttataaggaagccatgagttacccaggccatcttaaactacttgtgacaaggatcatgcaagactctgaaagtgacacgttttttccagaaattgatttggagaaatataaacctccgccagaatacccaggtgttctctctgatgtccaggaggcgaaaggcattaagtacaaacttgaagtatatgagaagaatgat

SEQ ID NO: 123 - DNA, 561 bp, synthetic construct
  misc_feature 1..561: note = Description of Artificial Sequence: Synthetic destabilizing domain (DD)
  source 1..561: mol_type = other DNA
atggctggttcgctaaactgcatcgtcgctgtgtcccagaatatgggcgtcggcaagaacggggacctgccctggccaccgctcagggatggattcagatatttccggagaatgaccacaacctcttcagtagaaggtaaacagaatctggtgattatgggtaagaagacctggtcctccattcctgagaagaatcgacctttagagggtagaactaatttagttctcagcagagaactcaaggaacctccacaaggagcttatcttctttccagaagtctagatgatgccttaaaacttactgagcagccagaattagcagatgaagcaggcatggtctgggtagttggtggcagttctgttgataaggaagccatgaatcacccaggccatcccaaactatctgtgacaaggatcgtgcaagactttggaagtgacgcgttttttccagaaattgatttggagaaatgcaaacttctgccagaatacccaggtgttctctctgatgcccaggaggagagaggcattaagtacaaatttgaagtatacgagaagagtgac

SEQ ID NO: 124 - DNA, 561 bp, synthetic construct
  misc_feature 1..561: note = Description of Artificial Sequence: Synthetic destabilizing domain (DD)
  source 1..561: mol_type = other DNA
atggttggttcgctaaactgcatcgtcgctgtgtcccagaacatgggcatcggcaagaacggggacctgccctggccaccgcccaggcatgaattcagatatttccagagagtgaccacaacctcttcagcagaaggtaaacagaatctggtgattatgggcaagaagacctggttctccatccctgagaagaatcgaccttcaaagggtagaattggtttagttctcagcggagaactcaaggaacctccacagggagcccactttctctccaggagtctagatgataccttaagacttactgaacaaccagaattaacgaatagagtaaacatggtctggatagttggtggcagttctgtttataaggaggccatgaatcacccaggccaccttagaccagttgtgacaaggatcatgcaggactttgaaagcgacgcgttttttccagaagttgacttggagaaatatagacttctaccagaatacccaggtgttctctctgatgtccagggggagaaaggcattaagtacaaatttgaagcatataggaagaatgat

SEQ ID NO: 125 - DNA, 558 bp, synthetic construct
  misc_feature 1..558: note = Description of Artificial Sequence: Synthetic destabilizing domain (DD)
  source 1..558: mol_type = other DNA
atggttggctcgctaaactgcatcgtcactgtgtcccggagcatgggcatcggcaaggacggggacctgtcctggccaccgctcaggagtgaattcaggtactttcagagaacgaccgcaacctcttcagtagaaggtagacagagtctggtgatcatgggcaagaggacctggttctccactcctgagaggaatcgacccttaaggggtagagctaacttagttctcagcggagagctcaagggacctccacaaggagctcatcttctttccagaagtctagatggtgccttaaaacttactgaacagccagagttagcagataaagtagacgtggtccggatagttggtggcagttctgttgatgaggaagccatgaatcacccaggccatcttaaactatttgtgacaagagtcatgcggggctttgaaagtgatacgctttttccaggaatcgacttggggaaacgtaaacttctgccagaatacccaggtgttctctctgatgtccgggaggagaaaggcattaagtacaaacttgaagtatgtgggaataat

SEQ ID NO: 126 - DNA, 558 bp, synthetic construct
  misc_feature 1..558: note = Description of Artificial Sequence: Synthetic destabilizing domain (DD)
  source 1..558: mol_type = other DNA
gttggttcgctaaactgcatcgtcgctgtgtcccagaacatgggcgtcggcaagaacggggacctgccctggccaccgctcaggaatgaattcagatatttccagagaatgaccacaacctcttcagtagaaggtaaacagaatctggtgattatgggtaagaagacctggttctccattcctgagaagaatcgacctttaaagggtagaattaatttagttctcagcagagaactcaaggaacctccacaaggagctcattttctttccagaagtctagatgatgccttaaaacttactgaacaaccagaattagcaaataaagtagacatggtctggatagttggtggcagttctgttattaaggaagccatgaatcacccaggccatcttaaactatttgtgacaaggatcatgcaagactttgaaagtgacacgttttttccagaaattgatttggagaaatataaacttctgccagaatacccaggtgttctctctgatgtccaggaggagaaaggcattaagtacaaatttgaagtatatgagaagaatgat

SEQ ID NO: 127 - DNA, 558 bp, synthetic construct
  misc_feature 1..558: note = Description of Artificial Sequence: Synthetic destabilizing domain (DD)
  source 1..558: mol_type = other DNA
gttggttcgctaaactgcatcgtcgctgtgtcccagaacatgggcatcggcaagaacggggacctgccctggccaccgctcaggaatgaattcagatatttccagagaatgaccacaacctcttcagtagaaggtaaacagaatctggtgattatgggtaagaagacctggttctccattcctgagaagaatcgacctttaaagggtagaattaatttagttctcagcagagaactcaaggaacctccacaaggagctcattttctttccagaagtctagatgatgccttaaaacttactgaacaaccagaattagcaaataaagtagacatggtctggatagttggtggcagttctgttattaaggaagccatgaatcacccaggccatcttaaactatttgtgacaaggatcatccaagactttgaaagtgacacgttttttccagaaattgatttggagaaatataaacttctgccagaatacccaggtgttctctctgatgtccaggaggagaaaggcattaagtacaaatttgaagtatatgagaagaatgat

SEQ ID NO: 128 - DNA, 558 bp, synthetic construct
  misc_feature 1..558: note = Description of Artificial Sequence: Synthetic destabilizing domain (DD)
  source 1..558: mol_type = other DNA
gttggttcgctaaactgcatcgtcgctgtgtcccagaacatgggcatcggcaagaacggggacctgccctggccaccgctcaggaatgaattcagatatttccagagaatgaccacaacctcttcagtagaaggtaaacagaatctggtgattatgggtaagaagacctggttctccattcctgagaagaatcgacctttaaagggtagaattaatttagttctcagcagagaactcaaggaacctccacaaggagctcattttctttccagaagtctagatgatgccttaaaacttactgaacaaccagaattagcaaataaagtagacatggtctggatagttggtggcagttctgttattaaggaagccatgtatcacccaggccatcttaaactatttgtgacaaggatcatgcaagactttgaaagtgacacgttttttccagaaattgatttggagaaatataaacttctgccagaatacccaggtgttctctctgatgtccaggaggagaaaggcattaagtacaaatttgaagtatatgagaagaatgat

SEQ ID NO: 129 - DNA, 558 bp, synthetic construct
  misc_feature 1..558: note = Description of Artificial Sequence: Synthetic destabilizing domain (DD)
  source 1..558: mol_type = other DNA
gttggttcgctaaactgcatcgtcgctgtgtcccagaacatgggcatcggcaagaacggggacctgccctggccaccgctcaggaatgaattcagatatttccagagaatgaccacaacctcttcagtagaaggtaaacagaatctggtgattatgggtaagaagacctggttctccattcctgagaagaatcgacctttaaagggtagaattaatttagttctcagcagagaactcaaggaacctccacaaggagctcattttctttccagaagtctagatgatgccttaaaacttactgaacaaccagaattagcaaataaagtagacatggtctggatagttggtggcagttctgttattaaggaagccatgaatcacccaggccgtcttaaactatttgtgacaaggatcatgcaagactttggaagtgacacgttttttccagaaattgatttggagaaatataaacttctgccagaatacccaggtgttctctctgatgtccaggaggagaaaggcattaagtacaaatttgaagtatatgagaagaatgat

SEQ ID NO: 130 - DNA, 558 bp, synthetic construct
  misc_feature 1..558: note = Description of Artificial Sequence: Synthetic destabilizing domain (DD)
  source 1..558: mol_type = other DNA
gttggttcgctaaactgcatcgtcgctgtgtcccagaacatgggcatcggcaagaacgggtccctgccctggccaccgctcaggaatgaaatgagctatttctcgagaatgaccacaacctcttcagtagaaggtaaacagaatctggtgattatgggtaagaagacctggttctccattcctgagaagagtcgacctttaaagggtagaattaatttagttctcagcagagaactcaaggaacctccacaaggagctcattttctttccagaagtctagatgatgccttaaaacttactgaacaaccagaattagcaaataaagtagacatggtctggatagttggtggcagttctgtttataaggaagccatgaatcacccaggccatcttaaactatttgtgacaaggatcatgcaagactttgaaagtgacacgttttttccagaaattgatttggagaaatataaacttctgccagaatacccaggtgttctctctgatgtccaggaggagaaaggcattaagtacaaatttgaagtatatgagaagaatgat

SEQ ID NO: 131 - DNA, 558 bp, synthetic construct
  misc_feature 1..558: note = Description of Artificial Sequence: Synthetic destabilizing domain (DD)
  source 1..558: mol_type = other DNA
gttggttcgctaaactgcatcgtcgctgtgtcccagaacatgggcatcggcaagaacggggacctgccctggccaccgctcaggaatgatatgagatatttccagagaatgaccacaacctcttcagtagaaggtaaacagaatctggtgattatgggtaagaagacctggttctccattcctgagaagaatcgacctttaaagggtagaattaatttagttctcagcagagaactcaaggaacctccacaaggagctcattttctttccagaagtctagatgatgccttaaaacttactgaacaaccagaattagcaaataaagtagacatggtctggataattggtggcagttctgtttataaggaagccatgaatcacccaggccatcttaaactatttgtgacaaggatcatgcaagactttgaaagtgacacgttttttccagaaattgatttggagaaatataaacttctgccagaatacccaggtgttctctctgatgtccaggaggagaaaggcattaagtacaaatttgaagtatatgagaagaatgat

SEQ ID NO: 132 - DNA, 558 bp, synthetic construct
  misc_feature 1..558: note = Description of Artificial Sequence: Synthetic destabilizing domain (DD)
  source 1..558: mol_type = other DNA
gttggttcgctaaactgcatcgtcgctgtgtcccagaacatgggcatcggcaagaacggggacctgccctggccaccgctcaggaatgaattcagatatttccagagaatgaccacaacctcttcagtagaaggtaaacagaatctggtgattatgggtaagaagacctggttctccattcctgagaagaatcgacctttaaagggtagaattaatttagttctcagcagagaactcaaggaacctccacaaggagctcattttctttccagaagtgcagatgatgccttaaaacttactgaacaaccagaattagcaaataaagtagacatggtctggatagttggtggcagttctgtttataaggaagccatgaatcacccaggccatcttaaactatttgtgacaaggatcatgcaagactttgaaagtgacgcgttttttccagaaattgatttggagaaatataaacttctgccagaatacccaggtgttctctctgatgtccaggaggagaaaggcattaagtacaaatttgaagtatatgagaagaatgat

SEQ ID NO: 133 - DNA, 558 bp, synthetic construct
  misc_feature 1..558: note = Description of Artificial Sequence: Synthetic destabilizing domain (DD)
  source 1..558: mol_type = other DNA
gttggttcgctaaactgcatcgtcgctgtgtcccagaacatgggcatcggcaagaacacggacctgccctggccaccgctcaggaatgaattcagatatttccagagaatgaccacaacctcttcagtagaaggtaaacagaatctggtgattatgggtaagaagacctggttctccattcctgagaagaatcgacctttaaagggtagaattaatttagttctcagcagagaactcaaggaacctccacaaggagctcattttctttccagaagtctagatgatgccttaaaacttactgaacaaccagaattagcaaataaagtagacatggtctggatagttggtggcagttctgttattaaggaagccatgaatcacccaggccatcttaaactatttgtgacaaggatcatgcaagactttgaaagtgacacgttttttccagaaattgatttggagaaatataaacttctgccagaatacccaggtgttctctctgatgtccaggaggagaaaggcattaagtacaaatttgaagtatatgagaagaatgat

SEQ ID NO: 134 - DNA, 558 bp, synthetic construct
  misc_feature 1..558: note = Description of Artificial Sequence: Synthetic destabilizing domain (DD)
  source 1..558: mol_type = other DNA
gttggttcgctaaactgcatcgtcgctgtgtcccagaacatgggcatcggcaagaacggggacctgccctggccaccgctcaggaatgaattcagatatttccagagaatgaccacaacctcttcagtagaaggtaaacagaatctggtgattatgggtaagaagacctggttctccattcctgagaagaatcgacctttaaagggtagaattaatttagttctcagcagagaactcaaggaacctccacaaggagctcattttctttccagaagtctagatgatgccttaaaacttactgaacaaccagaattagcaaataaagtagacatggtctggatagttggtggcagttctgctattaaggaagccatgaatcacccaggccatcttaaactatttgtgacaaggatcatgcaagactttgaaagtgacacgttttttccagaaattgatttggagaaatataaacttctgccagaatacccaggtgttctctctgatgtccaggaggagaaaggcattaagtacaaatttgaagtatatgagaagaatgat

SEQ ID NO: 135 - DNA, 561 bp, synthetic construct
  misc_feature 1..561: note = Description of Artificial Sequence: Synthetic destabilizing domain (DD)
  source 1..561: mol_type = other DNA
atggtgggcagcctgaactgtatcgtggccgtgtcccagaacatgggcatcggcaagaatggcgatctgccatggccccctctgcggaacgagttcagatacttctttaggatgaccacaaccagctccgtggagggcaagcagaacctggtcatcatgggcaagaagacctggttttctatccccgagaagaacagacctctgaagggcaggatcaatctggtgctgagcagagagctgaaggagccaccacagggagcacacttcctgagccggagcctggacgatgccctgaagctgacagagcagccagagctggccaacaaggtggacatggtgtggatcgtgggcggctctagcgtgatcaaggagtttatgaatcaccccggccacctgaagctgttcgtgaccagaatcatgcaggactttgagtccgatacattctttcctgagatcgatctggagaagtacaagctgctgccagagtatcccggcgtgctgtctgacgtgcaggaggagaagggcatcaagtacaagttcgaggtgtatgagaagaacgat

SEQ ID NO: 136 - DNA, 561 bp, synthetic construct
  misc_feature 1..561: note = Description of Artificial Sequence: Synthetic destabilizing domain (DD)
  source 1..561: mol_type = other DNA
atggttggttcgctaaactgcatcgtcgctgtgtcccagaacatgggcgtcggcaagaacggggacctgccctggccaccgctcaggaatgaattcagatatttccagagaatgaccacaacctcttcagtagaaggtaaacagaatctggtgattatgggtaagaagacctggttctccattcctgagaagaatcgacctttaaagggtagaattaatttagttctcagcagagaactcaaggaacctccacaaggagctcattttctttccagaagtctagatgatgccttaaaacttactgaacaaccagaattagcaaataaagtagacatggtctggatagttggtggcagttctgttattaaggaagccatgaatcacccaggccatcttaaactatttgtgacaaggatcatgcaagactttgaaagtgacacgttttttccagaaattgatttggagaaatataaacttctgccagaatacccaggtgttctctctgatgtccaggaggagaaaggcattaagtacaaatttgaagtatatgagaagaatgat

SEQ ID NO: 137 - DNA, 561 bp, synthetic construct
  misc_feature 1..561: note = Description of Artificial Sequence: Synthetic destabilizing domain (DD)
  source 1..561: mol_type = other DNA
atggttggttcgctaaactgcatcgtcgctgtgtcccagaacatgggcatcggcaagaacggggacctgccctggccaccgctcaggaatgaattcagatatttccagagaatgaccacaacctcttcagtagaaggtaaacagaatctggtgattatgggtaagaagacctggttctccattcctgagaagaatcgacctttaaagggtagaattaatttagttctcagcagagaactcaaggaacctccacaaggagctcattttctttccagaagtctagatgatgccttaaaacttactgaacaaccagaattagcaaataaagtagacatggtctggatagttggtggcagttctgttattaaggaagccatgaatcacccaggccatcttaaactatttgtgacaaggatcatccaagactttgaaagtgacacgttttttccagaaattgatttggagaaatataaacttctgccagaatacccaggtgttctctctgatgtccaggaggagaaaggcattaagtacaaatttgaagtatatgagaagaatgat

SEQ ID NO: 138 - DNA, 561 bp, synthetic construct
  misc_feature 1..561: note = Description of Artificial Sequence: Synthetic destabilizing domain (DD)
  source 1..561: mol_type = other DNA
atggttggttcgctaaactgcatcgtcgctgtgtcccagaacatgggcatcggcaagaacggggacctgccctggccaccgctcaggaatgaattcagatatttccagagaatgaccacaacctcttcagtagaaggtaaacagaatctggtgattatgggtaagaagacctggttctccattcctgagaagaatcgacctttaaagggtagaattaatttagttctcagcagagaactcaaggaacctccacaaggagctcattttctttccagaagtctagatgatgccttaaaacttactgaacaaccagaattagcaaataaagtagacatggtctggatagttggtggcagttctgttattaaggaagccatgtatcacccaggccatcttaaactatttgtgacaaggatcatgcaagactttgaaagtgacacgttttttccagaaattgatttggagaaatataaacttctgccagaatacccaggtgttctctctgatgtccaggaggagaaaggcattaagtacaaatttgaagtatatgagaagaatgat

SEQ ID NO: 139 - DNA, 561 bp, synthetic construct
  misc_feature 1..561: note = Description of Artificial Sequence: Synthetic destabilizing domain (DD)
  source 1..561: mol_type = other DNA
atggttggttcgctaaactgcatcgtcgctgtgtcccagaacatgggcatcggcaagaacggggacctgccctggccaccgctcaggaatgaattcagatatttccagagaatgaccacaacctcttcagtagaaggtaaacagaatctggtgattatgggtaagaagacctggttctccattcctgagaagaatcgacctttaaagggtagaattaatttagttctcagcagagaactcaaggaacctccacaaggagctcattttctttccagaagtctagatgatgccttaaaacttactgaacaaccagaattagcaaataaagtagacatggtctggatagttggtggcagttctgttattaaggaagccatgaatcacccaggccgtcttaaactatttgtgacaaggatcatgcaagactttggaagtgacacgttttttccagaaattgatttggagaaatataaacttctgccagaatacccaggtgttctctctgatgtccaggaggagaaaggcattaagtacaaatttgaagtatatgagaagaatgat

SEQ ID NO: 140 - DNA, 561 bp, synthetic construct
  misc_feature 1..561: note = Description of Artificial Sequence: Synthetic destabilizing domain (DD)
  source 1..561: mol_type = other DNA
atggttggttcgctaaactgcatcgtcgctgtgtcccagaacatgggcatcggcaagaacgggtccctgccctggccaccgctcaggaatgaaatgagctatttctcgagaatgaccacaacctcttcagtagaaggtaaacagaatctggtgattatgggtaagaagacctggttctccattcctgagaagagtcgacctttaaagggtagaattaatttagttctcagcagagaactcaaggaacctccacaaggagctcattttctttccagaagtctagatgatgccttaaaacttactgaacaaccagaattagcaaataaagtagacatggtctggatagttggtggcagttctgtttataaggaagccatgaatcacccaggccatcttaaactatttgtgacaaggatcatgcaagactttgaaagtgacacgttttttccagaaattgatttggagaaatataaacttctgccagaatacccaggtgttctctctgatgtccaggaggagaaaggcattaagtacaaatttgaagtatatgagaagaatgat

SEQ ID NO: 141 - DNA, 561 bp, synthetic construct
  misc_feature 1..561: note = Description of Artificial Sequence: Synthetic destabilizing domain (DD)
  source 1..561: mol_type = other DNA
atggttggttcgctaaactgcatcgtcgctgtgtcccagaacatgggcatcggcaagaacggggacctgccctggccaccgctcaggaatgatatgagatatttccagagaatgaccacaacctcttcagtagaaggtaaacagaatctggtgattatgggtaagaagacctggttctccattcctgagaagaatcgacctttaaagggtagaattaatttagttctcagcagagaactcaaggaacctccacaaggagctcattttctttccagaagtctagatgatgccttaaaacttactgaacaaccagaattagcaaataaagtagacatggtctggataattggtggcagttctgtttataaggaagccatgaatcacccaggccatcttaaactatttgtgacaaggatcatgcaagactttgaaagtgacacgttttttccagaaattgatttggagaaatataaacttctgccagaatacccaggtgttctctctgatgtccaggaggagaaaggcattaagtacaaatttgaagtatatgagaagaatgat

SEQ ID NO: 142 - DNA, 1305 bp, synthetic construct
  misc_feature 1..1305: note = Description of Artificial Sequence: Synthetic polynucleotide
  source 1..1305: mol_type = other DNA
atggttggttcgctaaactgcatcgtcgctgtgtcccagaacatgggcatcggcaagaacggggacctgccctggccaccgctcaggaatgaattcagatatttccagagaatgaccacaacctcttcagtagaaggtaaacagaatctggtgattatgggtaagaagacctggttctccattcctgagaagaatcgacctttaaagggtagaattaatttagttctcagcagagaactcaaggaacctccacaaggagctcattttctttccagaagtctagatgatgccttaaaacttactgaacaaccagaattagcaaataaagtagacatggtctggatagttggtggcagttctgtttataaggaagccatgaatcacccaggccatcttaaactatttgtgacaaggatcatgcaagactttgaaagtgacacgttttttccagaaattgatttggagaaatataaacttctgccagaatacccaggtgttctctctgatgtccaggaggagaaaggcattaagtacaaatttgaagtatatgagaagaatgatactagtggtggctctggtggtggtatggtttctaaaggtgcggagctgttcaccggtatcgttccgatcctgatcgaactgaacggtgacgtaaacggtcacaaattctctgtttctggtgaaggcgagggtgacgcgacgtacggtaagctgacgctgaagttcatctgcactaccggcaaactgccggttccgtggccgaccctggttaccaccctctcttacggtgttcagtgcttctctcgttacccggaccatatgaaacagcacgacttcttcaaatctgctatgccggaaggttacatccaggaacgtaccatctttttcgaagacgatggtaactataagtctcgtgcagaggttaaattcgagggcgataccctcgtgaaccgcatcgagctgaccggcactgacttcaaggaagacggtaacatcctgggtaacaaaatggaatacaactacaacgctcacaacgtttacatcatgaccgacaaagccaaaaacggtatcaaggttaacttcaaaatccgtcacaacatcgaggatggttctgttcagctggcggaccactaccagcaaaacacccctatcggcgacggtccggtgctgctgccggacaatcactatctgtccacccagtccgcgctgtctaaagaccctaacgaaaaacgtgaccacatgatctacttcggtttcgtgaccgcagcggcaattacccacggtatggacgaactctacaaatga

SEQ ID NO: 143 - DNA, 1302 bp, synthetic construct
  misc_feature 1..1302: note = Description of Artificial Sequence: Synthetic polynucleotide
  source 1..1302: mol_type = other DNA
atggtttctaaaggtgcggagctgttcaccggtatcgttccgatcctgatcgaactgaacggtgacgtaaacggtcacaaattctctgtttctggtgaaggcgagggtgacgcgacgtacggtaagctgacgctgaagttcatctgcactaccggcaaactgccggttccgtggccgaccctggttaccaccctctcttacggtgttcagtgcttctctcgttacccggaccatatgaaacagcacgacttcttcaaatctgctatgccggaaggttacatccaggaacgtaccatctttttcgaagacgatggtaactataagtctcgtgcagaggttaaattcgagggcgataccctcgtgaaccgcatcgagctgaccggcactgacttcaaggaagacggtaacatcctgggtaacaaaatggaatacaactacaacgctcacaacgtttacatcatgaccgacaaagccaaaaacggtatcaaggttaacttcaaaatccgtcacaacatcgaggatggttctgttcagctggcggaccactaccagcaaaacacccctatcggcgacggtccggtgctgctgccggacaatcactatctgtccacccagtccgcgctgtctaaagaccctaacgaaaaacgtgaccacatgatctacttcggtttcgtgaccgcagcggcaattacccacggtatggacgaactctacaaaggtggctctggtggtggtactagtgttggttcgctaaactgcatcgtcgctgtgtcccagaacatgggcatcggcaagaacggggacctgccctggccaccgctcaggaatgaattcagatatttccagagaatgaccacaacctcttcagtagaaggtaaacagaatctggtgattatgggtaagaagacctggttctccattcctgagaagaatcgacctttaaagggtagaattaatttagttctcagcagagaactcaaggaacctccacaaggagctcattttctttccagaagtctagatgatgccttaaaacttactgaacaaccagaattagcaaataaagtagacatggtctggatagttggtggcagttctgtttataaggaagccatgaatcacccaggccatcttaaactatttgtgacaaggatcatgcaagactttgaaagtgacacgttttttccagaaattgatttggagaaatataaacttctgccagaatacccaggtgttctctctgatgtccaggaggagaaaggcattaagtacaaatttgaagtatatgagaagaatgattga

SEQ ID NO: 144 - DNA, 1215 bp, synthetic construct
  misc_feature 1..1215: note = Description of Artificial Sequence: Synthetic polynucleotide
  source 1..1215: mol_type = other DNA
atgatctctctgattgcggcgctggcagttgaccgcgttattggcatggaaaacgcgatgccatggaacctcccggctgacctggcgtggttcaaacgtaacaccctgaacaaacctgtgatcatgggtcgtcacacctgggaatctattggccgtcctctcccgggtcgtaaaaacatcattctgtcttctcagccaggcaccgacgaccgtgttacctgggttaaaagcgttgacgaagcgattgctgcgtgcggtgatgttcctgaaattatggtgatcggcggtggccgtgtttacgaacagttcctgccgaaagcgcagaaactgtacctgacccacatcgacgcggaagttgaaggtgacacccacttcccggactacgaaccggatgattgggagagcgtattctccgaattccatgatgcggatgcgcaaaactctcattcttactgttttgaaatcctggaacgtcgtggtggctctggtggtggtatggtttctaaaggtgcggagctgttcaccggtatcgttccgatcctgatcgaactgaacggtgacgtaaacggtcacaaattctctgtttctggtgaaggcgagggtgacgcgacgtacggtaagctgacgctgaagttcatctgcactaccggcaaactgccggttccgtggccgaccctggttaccaccctctcttacggtgttcagtgcttctctcgttacccggaccatatgaaacagcacgacttcttcaaatctgctatgccggaaggttacatccaggaacgtaccatctttttcgaagacgatggtaactataagtctcgtgcagaggttaaattcgagggcgataccctcgtgaaccgcatcgagctgaccggcactgacttcaaggaagacggtaacatcctgggtaacaaaatggaatacaactacaacgctcacaacgtttacatcatgaccgacaaagccaaaaacggtatcaaggttaacttcaaaatccgtcacaacatcgaggatggttctgttcagctggcggaccactaccagcaaaacacccctatcggcgacggtccggtgctgctgccggacaatcactatctgtccacccagtccgcgctgtctaaagaccctaacgaaaaacgtgaccacatgatctacttcggtttcgtgaccgcagcggcaattacccacggtatggacgaactctacaaatga

SEQ ID NO: 145 - DNA, 1305 bp, synthetic construct
  misc_feature 1..1305: note = Description of Artificial Sequence: Synthetic polynucleotide
  source 1..1305: mol_type = other DNA
atggttggttcgctaaactgcatcgtcgctgtgtcccagaacatgggcatcggcaagaacggggacctgccctggccaccgctcaggaatgaattcagatatttccagagaatgaccacaacctcttcagtagaaggtaaacagaatctggtgattatgggtaagaagacctggttctccattcctgagaagaatcgacctttaaagggtagaattaatttagttctcagcagagaactcaaggaacctccacaaggagctcattttctttccagaagtctagatgatgccttaaaacttactgaacaaccagaattagcaaataaagtagacatggtctggatagttggtggcagttctgttattaaggaagccatgaatcacccaggccatcttaaactatttgtgacaaggatcatgcaagactttgaaagtgacacgttttttccagaaattgatttggagaaatataaacttctgccagaatacccaggtgttctctctgatgtccaggaggagaaaggcattaagtacaaatttgaagtatatgagaagaatgatactagtggtggctctggtggtggtatggtttctaaaggtgcggagctgttcaccggtatcgttccgatcctgatcgaactgaacggtgacgtaaacggtcacaaattctctgtttctggtgaaggcgagggtgacgcgacgtacggtaagctgacgctgaagttcatctgcactaccggcaaactgccggttccgtggccgaccctggttaccaccctctcttacggtgttcagtgcttctctcgttacccggaccatatgaaacagcacgacttcttcaaatctgctatgccggaaggttacatccaggaacgtaccatctttttcgaagacgatggtaactataagtctcgtgcagaggttaaattcgagggcgataccctcgtgaaccgcatcgagctgaccggcactgacttcaaggaagacggtaacatcctgggtaacaaaatggaatacaactacaacgctcacaacgtttacatcatgaccgacaaagccaaaaacggtatcaaggttaacttcaaaatccgtcacaacatcgaggatggttctgttcagctggcggaccactaccagcaaaacacccctatcggcgacggtccggtgctgctgccggacaatcactatctgtccacccagtccgcgctgtctaaagaccctaacgaaaaacgtgaccacatgatctacttcggtttcgtgaccgcagcggcaattacccacggtatggacgaactctacaaatga

SEQ ID NO: 146 - DNA, 1305 bp, synthetic construct
  misc_feature 1..1305: note = Description of Artificial Sequence: Synthetic polynucleotide
  source 1..1305: mol_type = other DNA
atggttggttcgctaaactgcatcgtcgctgtgtcccagaacatgggcatcggcaagaacggggacctgccctggccaccgctcaggaatgaattcagatatttccagagaatgaccacaacctcttcagtagaaggtaaacagaatctggtgattacgggtaagaagacctggttctccattcctgagaagaatcgacctttaaagggtagaattaatttagttctcagcagagaactcaaggaacctccacaaggagctcattttctttccagaagtctagatgatgccttaaaacttactgaacaaccagaattagcaaataaagtagacatggtctggatagttggtggcagttctgtttataaggaagccatgaatcacccaggccatcttaaactatttgtgacaatcatcatgcaagactttgaaagtgacacgttttttccagaaattgatttggagaaatataaacttctgccagaatacccaggtgttctctctgatgtccaggaggagaaaggcattaagtacaaatttgaagtatatgagaagaatgatactagtggtggctctggtggtggtatggtttctaaaggtgcggagctgttcaccggtatcgttccgatcctgatcgaactgaacggtgacgtaaacggtcacaaattctctgtttctggtgaaggcgagggtgacgcgacgtacggtaagctgacgctgaagttcatctgcactaccggcaaactgccggttccgtggccgaccctggttaccaccctctcttacggtgttcagtgcttctctcgttacccggaccatatgaaacagcacgacttcttcaaatctgctatgccggaaggttacatccaggaacgtaccatctttttcgaagacgatggtaactataagtctcgtgcagaggttaaattcgagggcgataccctcgtgaaccgcatcgagctgaccggcactgacttcaaggaagacggtaacatcctgggtaacaaaatggaatacaactacaacgctcacaacgtttacatcatgaccgacaaagccaaaaacggtatcaaggttaacttcaaaatccgtcacaacatcgaggatggttctgttcagctggcggaccactaccagcaaaacacccctatcggcgacggtccggtgctgctgccggacaatcactatctgtccacccagtccgcgctgtctaaagaccctaacgaaaaacgtgaccacatgatctacttcggtttcgtgaccgcagcggcaattacccacggtatggacgaactctacaaatga

SEQ ID NO: 147 - DNA, 1305 bp, synthetic construct
  misc_feature 1..1305: note = Description of Artificial Sequence: Synthetic polynucleotide
  source 1..1305: mol_type = other DNA
atggttggttcgctaaactgcatcgtcgctgtgtcccagaacatgggcatcggcaagaacggggacctgccctggccaccgctcaggaatgaattcagatatttccagagaatgaccacaacctcttcagtagaaggtaaacagaatctggtgattatgggtaagaagacctggttctccattcctgagaagaatcgacctttaaagggtagaattaatttatttctcagcagagaactcaaggaacctccacaaggagctcattttctttccagaagtctagatgatgccttaaaacttactgaacaaccagaattagcaaataaagtagacatggtctggatagttggtggcagttctgttattaaggaagccatgaatcacccaggccatcttaaactatttgtgacaaggatcatgcaagactttgaaagtgacacgttttttccagaaattgatttggagaaatataaacttctgccagaatacccaggtgttctctctgatgtccaggaggagaaaggcattaagtacaaatttgaagtatatgagaagaatgatactagtggtggctctggtggtggtatggtttctaaaggtgcggagctgttcaccggtatcgttccgatcctgatcgaactgaacggtgacgtaaacggtcacaaattctctgtttctggtgaaggcgagggtgacgcgacgtacggtaagctgacgctgaagttcatctgcactaccggcaaactgccggttccgtggccgaccctggttaccaccctctcttacggtgttcagtgcttctctcgttacccggaccatatgaaacagcacgacttcttcaaatctgctatgccggaaggttacatccaggaacgtaccatctttttcgaagacgatggtaactataagtctcgtgcagaggttaaattcgagggcgataccctcgtgaaccgcatcgagctgaccggcactgacttcaaggaagacggtaacatcctgggtaacaaaatggaatacaactacaacgctcacaacgtttacatcatgaccgacaaagccaaaaacggtatcaaggttaacttcaaaatccgtcacaacatcgaggatggttctgttcagctggcggaccactaccagcaaaacacccctatcggcgacggtccggtgctgctgccggacaatcactatctgtccacccagtccgcgctgtctaaagaccctaacgaaaaacgtgaccacatgatctacttcggtttcgtgaccgcagcggcaattacccacggtatggacgaactctacaaatga

SEQ ID NO: 148 - DNA, 1305 bp, synthetic construct
  misc_feature 1..1305: note = Description of Artificial Sequence: Synthetic polynucleotide
  source 1..1305: mol_type = other DNA
atggttggttcgctaaactgcatcgtcgctgtgtcccagaacatgggcatcggcaagaacggggacctgccctggccaccgctcaggaatgaattcagatatttccagagaatgaccacaacctcttcagtagaaggtaaacagaatctggtgattatgggtaagaagacctggttctccattcctgagaagaatcgacctttaaagggtagaattaatttagttctcagcagagaactcaaggaacctccacaaggagctcattttctttccagaagtctagatgatgccttaaaacttactgaacaaccagaattagcaaataaagtagacatggtctggatagttggtggcagttctgttattaaggaattcatgaatcacccaggccatcttaaactatttgtgacaaggatcatgcaagactttgaaagtgacacgttttttccagaaattgatttggagaaatataaacttctgccagaatacccaggtgttctctctgatgtccaggaggagaaaggcattaagtacaaatttgaagtatatgagaagaatgatactagtggtggctctggtggtggtatggtttctaaaggtgcggagctgttcaccggtatcgttccgatcctgatcgaactgaacggtgacgtaaacggtcacaaattctctgtttctggtgaaggcgagggtgacgcgacgtacggtaagctgacgctgaagttcatctgcactaccggcaaactgccggttccgtggccgaccctggttaccaccctctcttacggtgttcagtgcttctctcgttacccggaccatatgaaacagcacgacttcttcaaatctgctatgccggaaggttacatccaggaacgtaccatctttttcgaagacgatggtaactataagtctcgtgcagaggttaaattcgagggcgataccctcgtgaaccgcatcgagctgaccggcactgacttcaaggaagacggtaacatcctgggtaacaaaatggaatacaactacaacgctcacaacgtttacatcatgaccgacaaagccaaaaacggtatcaaggttaacttcaaaatccgtcacaacatcgaggatggttctgttcagctggcggaccactaccagcaaaacacccctatcggcgacggtccggtgctgctgccggacaatcactatctgtccacccagtccgcgctgtctaaagaccctaacgaaaaacgtgaccacatgatctacttcggtttcgtgaccgcagcggcaattacccacggtatggacgaactctacaaatga

SEQ ID NO: 149 - DNA, 1305 bp, synthetic construct
  misc_feature 1..1305: note = Description of Artificial Sequence: Synthetic polynucleotide
  source 1..1305: mol_type = other DNA
atggttggttcgctaaactgcatcgtcgctgtgtcccagaacatgggcatcggcaagaacggggacctgccctggccaccgctcaggaatgaattcagatatttccagagaatgaccacaacctcttcagtagaaggtaaacagaatctggtgattatgggtaagaagacctggttctccattcctgagaagaatcgacctttaaagggtagaattaataacgttctcagcagagaactcaaggaacctccacaaggagctcattttctttccagaagtctagatgatgccttaaaacttactgaacaaccagaattagcaaataaagtagacatggtctggatagttggtggcagttctgttattaaggaagccatgaatcacccaggccatcttaaactatttgtgacaaggatcatgcaagactttgaaagtgacacgttttttccagaaattgatttggagaaatataaacttctgccagaatacccaggtgttctctctgatgtccaggaggagaaaggcattaagtacaaatttgaagtatatgagaagaatgatactagtggtggctctggtggtggtatggtttctaaaggtgcggagctgttcaccggtatcgttccgatcctgatcgaactgaacggtgacgtaaacggtcacaaattctctgtttctggtgaaggcgagggtgacgcgacgtacggtaagctgacgctgaagttcatctgcactaccggcaaactgccggttccgtggccgaccctggttaccaccctctcttacggtgttcagtgcttctctcgttacccggaccatatgaaacagcacgacttcttcaaatctgctatgccggaaggttacatccaggaacgtaccatctttttcgaagacgatggtaactataagtctcgtgcagaggttaaattcgagggcgataccctcgtgaaccgcatcgagctgaccggcactgacttcaaggaagacggtaacatcctgggtaacaaaatggaatacaactacaacgctcacaacgtttacatcatgaccgacaaagccaaaaacggtatcaaggttaacttcaaaatccgtcacaacatcgaggatggttctgttcagctggcggaccactaccagcaaaacacccctatcggcgacggtccggtgctgctgccggacaatcactatctgtccacccagtccgcgctgtctaaagaccctaacgaaaaacgtgaccacatgatctacttcggtttcgtgaccgcagcggcaattacccacggtatggacgaactctacaaatga

SEQ ID NO: 150 - DNA, 1305 bp, synthetic construct
  misc_feature 1..1305: note = Description of Artificial Sequence: Synthetic polynucleotide
  source 1..1305: mol_type = other DNA
atggttggttcgctaaactgcatcgtcgctgtgtcccagaacatgggcatcggcaagaacggggacctgccctggccaccgctcaggaatgaattcagatatttccagagaatgaccacaacctcttcagtagaaggtaaacagaatctggtgattatgggtaagaagacctggttctccattcctgagaagaatcgacctttaaagggtagaattaatttagttctcagcagagaactcaaggaacctccacaaggagctcattttctttccagaagtgcagatgatgccttaaaacttactgaacaaccagaattagcaaataaagtagacatggtctggatagttggtggcagttctgtttataaggaagccatgaatcacccaggccatcttaaactatttgtgacaaggatcatgcaagactttgaaagtgacgcgttttttccagaaattgatttggagaaatataaacttctgccagaatacccaggtgttctctctgatgtccaggaggagaaaggcattaagtacaaatttgaagtatatgagaagaatgatactagtggtggctctggtggtggtatggtttctaaaggtgcggagctgttcaccggtatcgttccgatcctgatcgaactgaacggtgacgtaaacggtcacaaattctctgtttctggtgaaggcgagggtgacgcgacgtacggtaagctgacgctgaagttcatctgcactaccggcaaactgccggttccgtggccgaccctggttaccaccctctcttacggtgttcagtgcttctctcgttacccggaccatatgaaacagcacgacttcttcaaatctgctatgccggaaggttacatccaggaacgtaccatctttttcgaagacgatggtaactataagtctcgtgcagaggttaaattcgagggcgataccctcgtgaaccgcatcgagctgaccggcactgacttcaaggaagacggtaacatcctgggtaacaaaatggaatacaactacaacgctcacaacgtttacatcatgaccgacaaagccaaaaacggtatcaaggttaacttcaaaatccgtcacaacatcgaggatggttctgttcagctggcggaccactaccagcaaaacacccctatcggcgacggtccggtgctgctgccggacaatcactatctgtccacccagtccgcgctgtctaaagaccctaacgaaaaacgtgaccacatgatctacttcggtttcgtgaccgcagcggcaattacccacggtatggacgaactctacaaatga

SEQ ID NO: 151 - DNA, 1305 bp, synthetic construct
  misc_feature 1..1305: note = Description of Artificial Sequence: Synthetic polynucleotide
  source 1..1305: mol_type = other DNA
atggttggttcgctaaactgcatcgtcgctgtgtcccagaacatgggcatcggcaagaacacggacctgccctggccaccgctcaggaatgaattcagatatttccagagaatgaccacaacctcttcagtagaaggtaaacagaatctggtgattatgggtaagaagacctggttctccattcctgagaagaatcgacctttaaagggtagaattaatttagttctcagcagagaactcaaggaacctccacaaggagctcattttctttccagaagtctagatgatgccttaaaacttactgaacaaccagaattagcaaataaagtagacatggtctggatagttggtggcagttctgttattaaggaagccatgaatcacccaggccatcttaaactatttgtgacaaggatcatgcaagactttgaaagtgacacgttttttccagaaattgatttggagaaatataaacttctgccagaatacccaggtgttctctctgatgtccaggaggagaaaggcattaagtacaaatttgaagtatatgagaagaatgatactagtggtggctctggtggtggtatggtttctaaaggtgcggagctgttcaccggtatcgttccgatcctgatcgaactgaacggtgacgtaaacggtcacaaattctctgtttctggtgaaggcgagggtgacgcgacgtacggtaagctgacgctgaagttcatctgcactaccggcaaactgccggttccgtggccgaccctggttaccaccctctcttacggtgttcagtgcttctctcgttacccggaccatatgaaacagcacgacttcttcaaatctgctatgccggaaggttacatccaggaacgtaccatctttttcgaagacgatggtaactataagtctcgtgcagaggttaaattcgagggcgataccctcgtgaaccgcatcgagctgaccggcactgacttcaaggaagacggtaacatcctgggtaacaaaatggaatacaactacaacgctcacaacgtttacatcatgaccgacaaagccaaaaacggtatcaaggttaacttcaaaatccgtcacaacatcgaggatggttctgttcagctggcggaccactaccagcaaaacacccctatcggcgacggtccggtgctgctgccggacaatcactatctgtccacccagtccgcgctgtctaaagaccctaacgaaaaacgtgaccacatgatctacttcggtttcgtgaccgcagcggcaattacccacggtatggacgaactctacaaatga

SEQ ID NO: 152 - DNA, 1305 bp, synthetic construct
  misc_feature 1..1305: note = Description of Artificial Sequence: Synthetic polynucleotide
  source 1..1305: mol_type = other DNA
atggttggttcgctaaactgcatcgtcgctgtgtcccagaacatgggcatcggcaagaacggggacctgccctggccaccgctcaggaatgaattcagatatttcaagagaatgaccacaacctcttcagtagaaggtaaacagaatctggtgattatgggtaagaagacctggttctccattcctgagaagaatcgacctttaaagggtagaattaatttagttctcagcagagaactcaaggaacctccacaaggagctcattttctttccagaagtctagatgatgccttaaaacttactgaacaaccagaattagcaaataaagtagacatggtctggatagttggtggcagttctgttattaaggaagccatgaatcacccaggccatcttaaactatttgtgacaaggatcatgcaagactttgaaagtgacacgttttttccagaaattgatttggagaaatataaacttctgccagaatacccaggtgttctctctgatgtccaggaggagaaaggcattaagtacaaatttgaagtatatgagaagaatgatactagtggtggctctggtggtggtatggtttctaaaggtgcggagctgttcaccggtatcgttccgatcctgatcgaactgaacggtgacgtaaacggtcacaaattctctgtttctggtgaaggcgagggtgacgcgacgtacggtaagctgacgctgaagttcatctgcactaccggcaaactgccggttccgtggccgaccctggttaccaccctctcttacggtgttcagtgcttctctcgttacccggaccatatgaaacagcacgacttcttcaaatctgctatgccggaaggttacatccaggaacgtaccatctttttcgaagacgatggtaactataagtctcgtgcagaggttaaattcgagggcgataccctcgtgaaccgcatcgagctgaccggcactgacttcaaggaagacggtaacatcctgggtaacaaaatggaatacaactacaacgctcacaacgtttacatcatgaccgacaaagccaaaaacggtatcaaggttaacttcaaaatccgtcacaacatcgaggatggttctgttcagctggcggaccactaccagcaaaacacccctatcggcgacggtccggtgctgctgccggacaatcactatctgtccacccagtccgcgctgtctaaagaccctaacgaaaaacgtgaccacatgatctacttcggtttcgtgaccgcagcggcaattacccacggtatggacgaactctacaaatga

SEQ ID NO: 153 - DNA, 1305 bp, synthetic construct
  misc_feature 1..1305: note = Description of Artificial Sequence: Synthetic polynucleotide
  source 1..1305: mol_type = other DNA
atggttggttcgctaaactgcatcgtcgctgtgtcccagaacatgggcatcggcaagaacggggacctgccctggccaccgctcaggaatgaattcagatatttcaagagaatgaccacaacctcttcagtagaaggtaaacagaatctggtgattatgggtaagaagacctggttctccattcctgagaagttccgacctttaaagggtagaattaatttagttctcagcagagaactcaaggaacctccacaaggagctcattttctttccagaagtctagatgatgccttaaaacttactgaacaaccagaattagcaaataaagtagacatggtctggatagttggtggcagttctgttattaaggaagccatgaatcacccaggccatcttaaactatttgtgacaaggatcatgcaagactttgaaagtgacacgttttttccagaaattgatttggagaaatataaacttctgccagaatacccaggtgttctctctgatgtccaggaggagaaaggcattaagtacaaatttgaagtatatgagaagaatgatactagtggtggctctggtggtggtatggtttctaaaggtgcggagctgttcaccggtatcgttccgatcctgatcgaactgaacggtgacgtaaacggtcacaaattctctgtttctggtgaaggcgagggtgacgcgacgtacggtaagctgacgctgaagttcatctgcactaccggcaaactgccggttccgtggccgaccctggttaccaccctctcttacggtgttcagtgcttctctcgttacccggaccatatgaaacagcacgacttcttcaaatctgctatgccggaaggttacatccaggaacgtaccatctttttcgaagacgatggtaactataagtctcgtgcagaggttaaattcgagggcgataccctcgtgaaccgcatcgagctgaccggcactgacttcaaggaagacggtaacatcctgggtaacaaaatggaatacaactacaacgctcacaacgtttacatcatgaccgacaaagccaaaaacggtatcaaggttaacttcaaaatccgtcacaacatcgaggatggttctgttcagctggcggaccactaccagcaaaacacccctatcggcgacggtccggtgctgctgccggacaatcactatctgtccacccagtccgcgctgtctaaagaccctaacgaaaaacgtgaccacatgatctacttcggtttcgtgaccgcagcggcaattacccacggtatggacgaactctacaaatga

SEQ ID NO: 154 - DNA, 1305 bp, synthetic construct
  misc_feature 1..1305: note = Description of Artificial Sequence: Synthetic polynucleotide
  source 1..1305: mol_type = other DNA
atggttggttcgctaaactgcatcgtcgctgtgtcccagaacatgggcatcggcaagaacggggacctgccctggccaccgctcaggaatgaattcagatatttccagagaatgaccacaacctcttcagtagaaggtaaacagaatctggtgattatgggtaagaagacctggttctccattcctgagaagaatcgacctttaaagggtagaattaatttagttctcagcagagaactcaaggaacctccacaaggagctcattttctttccagaagtctagatgatgccttaaaacttactgaacaaccagaattagcaaataaagtagacatggtctggatagttggtggcagttctgctattaaggaagccatgaatcacccaggccatcttaaactatttgtgacaaggatcatgcaagactttgaaagtgacacgttttttccagaaattgatttggagaaatataaacttctgccagaatacccaggtgttctctctgatgtccaggaggagaaaggcattaagtacaaatttgaagtatatgagaagaatgatactagtggtggctctggtggtggtatggtttctaaaggtgcggagctgttcaccggtatcgttccgatcctgatcgaactgaacggtgacgtaaacggtcacaaattctctgtttctggtgaaggcgagggtgacgcgacgtacggtaagctgacgctgaagttcatctgcactaccggcaaactgccggttccgtggccgaccctggttaccaccctctcttacggtgttcagtgcttctctcgttacccggaccatatgaaacagcacgacttcttcaaatctgctatgccggaaggttacatccaggaacgtaccatctttttcgaagacgatggtaactataagtctcgtgcagaggttaaattcgagggcgataccctcgtgaaccgcatcgagctgaccggcactgacttcaaggaagacggtaacatcctgggtaacaaaatggaatacaactacaacgctcacaacgtttacatcatgaccgacaaagccaaaaacggtatcaaggttaacttcaaaatccgtcacaacatcgaggatggttctgttcagctggcggaccactaccagcaaaacacccctatcggcgacggtccggtgctgctgccggacaatcactatctgtccacccagtccgcgctgtctaaagaccctaacgaaaaacgtgaccacatgatctacttcggtttcgtgaccgcagcggcaattacccacggtatggacgaactctacaaatga

SEQ ID NO: 155 - DNA, 1302 bp, synthetic construct
  misc_feature 1..1302: note = Description of Artificial Sequence: Synthetic polynucleotide
  source 1..1302: mol_type = other DNA
atggtttctaaaggtgcggagctgttcaccggtatcgttccgatcctgatcgaactgaacggtgacgtaaacggtcacaaattctctgtttctggtgaaggcgagggtgacgcgacgtacggtaagctgacgctgaagttcatctgcactaccggcaaactgccggttccgtggccgaccctggttaccaccctctcttacggtgttcagtgcttctctcgttacccggaccatatgaaacagcacgacttcttcaaatctgctatgccggaaggttacatccaggaacgtaccatctttttcgaagacgatggtaactataagtctcgtgcagaggttaaattcgagggcgataccctcgtgaaccgcatcgagctgaccggcactgacttcaaggaagacggtaacatcctgggtaacaaaatggaatacaactacaacgctcacaacgtttacatcatgaccgacaaagccaaaaacggtatcaaggttaacttcaaaatccgtcacaacatcgaggatggttctgttcagctggcggaccactaccagcaaaacacccctatcggcgacggtccggtgctgctgccggacaatcactatctgtccacccagtccgcgctgtctaaagaccctaacgaaaaacgtgaccacatgatctacttcggtttcgtgaccgcagcggcaattacccacggtatggacgaactctacaaaggtggctctggtggtggtactagtgttggttcgctaaactgcatcgtcgctgtgtcccagaacatgggcatcggcaagaacggggacctgccctggccaccgctcaggaatgaattcagatatttccagagaatgaccacaacctcttcagtagaaggtaaacagaatctggtgattacgggtaagaagacctggttctccattcctgagaagaatcgacctttaaagggtagaattaatttagttctcagcagagaactcaaggaacctccacaaggagctcattttctttccagaagtctagatgatgccttaaaacttactgaacaaccagaattagcaaataaagtagacatggtctggatagttggtggcagttctgtttataaggaagccatgaatcacccaggccatcttaaactatttgtgacaatcatcatgcaagactttgaaagtgacacgttttttccagaaattgatttggagaaatataaacttctgccagaatacccaggtgttctctctgatgtccaggaggagaaaggcattaagtacaaatttgaagtatatgagaagaatgattga

SEQ ID NO: 156 - DNA, 1302 bp, synthetic construct
  misc_feature 1..1302: note = Description of Artificial Sequence: Synthetic polynucleotide
  source 1..1302: mol_type = other DNA
atggtttctaaaggtgcggagctgttcaccggtatcgttccgatcctgatcgaactgaacggtgacgtaaacggtcacaaattctctgtttctggtgaaggcgagggtgacgcgacgtacggtaagctgacgctgaagttcatctgcactaccggcaaactgccggttccgtggccgaccctggttaccaccctctcttacggtgttcagtgcttctctcgttacccggaccatatgaaacagcacgacttcttcaaatctgctatgccggaaggttacatccaggaacgtaccatctttttcgaagacgatggtaactataagtctcgtgcagaggttaaattcgagggcgataccctcgtgaaccgcatcgagctgaccggcactgacttcaaggaagacggtaacatcctgggtaacaaaatggaatacaactacaacgctcacaacgtttacatcatgaccgacaaagccaaaaacggtatcaaggttaacttcaaaatccgtcacaacatcgaggatggttctgttcagctggcggaccactaccagcaaaacacccctatcggcgacggtccggtgctgctgccggacaatcactatctgtccacccagtccgcgctgtctaaagaccctaacgaaaaacgtgaccacatgatctacttcggtttcgtgaccgcagcggcaattacccacggtatggacgaactctacaaaggtggctctggtggtggtactagtgttggttcgctaaactgcatcgtcgctgtgtcccagaacatgggcatcggcaagaacggggacctgccctggccaccgctcaggaatgaattcagatatttccagagaatgaccacaacctcttcagtagaaggtaaacagaatctggtgattatgggtaagaagacctggttctccattcctgagaagaatcgacctttaaagggtagaattaatttatttctcagcagagaactcaaggaacctccacaaggagctcattttctttccagaagtctagatgatgccttaaaacttactgaacaaccagaattagcaaataaagtagacatggtctggatagttggtggcagttctgttattaaggaagccatgaatcacccaggccatcttaaactatttgtgacaaggatcatgcaagactttgaaagtgacacgttttttccagaaattgatttggagaaatataaacttctgccagaatacccaggtgttctctctgatgtccaggaggagaaaggcattaagtacaaatttgaagtatatgagaagaatgattga

SEQ ID NO: 157 - DNA, 1302 bp, synthetic construct
  misc_feature 1..1302: note = Description of Artificial Sequence: Synthetic polynucleotide
  source 1..1302: mol_type = other DNA
atggtttctaaaggtgcggagctgttcaccggtatcgttccgatcctgatcgaactgaacggtgacgtaaacggtcacaaattctctgtttctggtgaaggcgagggtgacgcgacgtacggtaagctgacgctgaagttcatctgcactaccggcaaactgccggttccgtggccgaccctggttaccaccctctcttacggtgttcagtgcttctctcgttacccggaccatatgaaacagcacgacttcttcaaatctgctatgccggaaggttacatccaggaacgtaccatctttttcgaagacgatggtaactataagtctcgtgcagaggttaaattcgagggcgataccctcgtgaaccgcatcgagctgaccggcactgacttcaaggaagacggtaacatcctgggtaacaaaatggaatacaactacaacgctcacaacgtttacatcatgaccgacaaagccaaaaacggtatcaaggttaacttcaaaatccgtcacaacatcgaggatggttctgttcagctggcggaccactaccagcaaaacacccctatcggcgacggtccggtgctgctgccggacaatcactatctgtccacccagtccgcgctgtctaaagaccctaacgaaaaacgtgaccacatgatctacttcggtttcgtgaccgcagcggcaattacccacggtatggacgaactctacaaaggtggctctggtggtggtactagtgttggttcgctaaactgcatcgtcgctgtgtcccagaacatgggcatcggcaagaacggggacctgccctggccaccgctcaggaatgaattcagatatttccagagaatgaccacaacctcttcagtagaaggtaaacagaatctggtgattatgggtaagaagacctggttctccattcctgagaagaatcgacctttaaagggtagaattaatttagttctcagcagagaactcaaggaacctccacaaggagctcattttctttccagaagtctagatgatgccttaaaacttactgaacaaccagaattagcaaataaagtagacatggtctggatagttggtggcagttctgttattaaggaattcatgaatcacccaggccatcttaaactatttgtgacaaggatcatgcaagactttgaaagtgacacgttttttccagaaattgatttggagaaatataaacttctgccagaatacccaggtgttctctctgatgtccaggaggagaaaggcattaagtacaaatttgaagtatatgagaagaatgattga

SEQ ID NO: 158 - DNA, 1302 bp, synthetic construct
  misc_feature 1..1302: note = Description of Artificial Sequence: Synthetic polynucleotide
  source 1..1302: mol_type = other DNA
atggtttctaaaggtgcggagctgttcaccggtatcgttccgatcctgatcgaactgaacggtgacgtaaacggtcacaaattctctgtttctggtgaaggcgagggtgacgcgacgtacggtaagctgacgctgaagttcatctgcactaccggcaaactgccggttccgtggccgaccctggttaccaccctctcttacggtgttcagtgcttctctcgttacccggaccatatgaaacagcacgacttcttcaaatctgctatgccggaaggttacatccaggaacgtaccatctttttcgaagacgatggtaactataagtctcgtgcagaggttaaattcgagggcgataccctcgtgaaccgcatcgagctgaccggcactgacttcaaggaagacggtaacatcctgggtaacaaaatggaatacaactacaacgctcacaacgtttacatcatgaccgacaaagccaaaaacggtatcaaggttaacttcaaaatccgtcacaacatcgaggatggttctgttcagctggcggaccactaccagcaaaacacccctatcggcgacggtccggtgctgctgccggacaatcactatctgtccacccagtccgcgctgtctaaagaccctaacgaaaaacgtgaccacatgatctacttcggtttcgtgaccgcagcggcaattacccacggtatggacgaactctacaaaggtggctctggtggtggtactagtgttggttcgctaaactgcatcgtcgctgtgtcccagaacatgggcatcggcaagaacggggacctgccctggccaccgctcaggaatgaattcagatatttccagagaatgaccacaacctcttcagtagaaggtaaacagaatctggtgattatgggtaagaagacctggttctccattcctgagaagaatcgacctttaaagggtagaattaataacgttctcagcagagaactcaaggaacctccacaaggagctcattttctttccagaagtctagatgatgccttaaaacttactgaacaaccagaattagcaaataaagtagacatggtctggatagttggtggcagttctgttattaaggaagccatgaatcacccaggccatcttaaactatttgtgacaaggatcatgcaagactttgaaagtgacacgttttttccagaaattgatttggagaaatataaacttctgccagaatacccaggtgttctctctgatgtccaggaggagaaaggcattaagtacaaatttgaagtatatgagaagaatgattga

SEQ ID NO: 159 - DNA, 1302 bp, synthetic construct
  misc_feature 1..1302: note = Description of Artificial Sequence: Synthetic polynucleotide
  source 1..1302: mol_type = other DNA
atggtttctaaaggtgcggagctgttcaccggtatcgttccgatcctgatcgaactgaacggtgacgtaaacggtcacaaattctctgtttctggtgaaggcgagggtgacgcgacgtacggtaagctgacgctgaagttcatctgcactaccggcaaactgccggttccgtggccgaccctggttaccaccctctcttacggtgttcagtgcttctctcgttacccggaccatatgaaacagcacgacttcttcaaatctgctatgccggaaggttacatccaggaacgtaccatctttttcgaagacgatggtaactataagtctcgtgcagaggttaaattcgagggcgataccctcgtgaaccgcatcgagctgaccggcactgacttcaaggaagacggtaacatcctgggtaacaaaatggaatacaactacaacgctcacaacgtttacatcatgaccgacaaagccaaaaacggtatcaaggttaacttcaaaatccgtcacaacatcgaggatggttctgttcagctggcggaccactaccagcaaaacacccctatcggcgacggtccggtgctgctgccggacaatcactatctgtccacccagtccgcgctgtctaaagaccctaacgaaaaacgtgaccacatgatctacttcggtttcgtgaccgcagcggcaattacccacggtatggacgaactctacaaaggtggctctggtggtggtactagtgttggttcgctaaactgcatcgtcgctgtgtcccagaacatgggcatcggcaagaacggggacctgccctggccaccgctcaggaatgaattcagatatttccagagaatgaccacaacctcttcagtagaaggtaaacagaatctggtgattatgggtaagaagacctggttctccattcctgagaagaatcgacctttaaagggtagaattaatttagttctcagcagagaactcaaggaacctccacaaggagctcattttctttccagaagtgcagatgatgccttaaaacttactgaacaaccagaattagcaaataaagtagacatggtctggatagttggtggcagttctgtttataaggaagccatgaatcacccaggccatcttaaactatttgtgacaaggatcatgcaagactttgaaagtgacgcgttttttccagaaattgatttggagaaatataaacttctgccagaatacccaggtgttctctctgatgtccaggaggagaaaggcattaagtacaaatttgaagtatatgagaagaatgattga

SEQ ID NO: 160 - DNA, 1302 bp, synthetic construct
  misc_feature 1..1302: note = Description of Artificial Sequence: Synthetic polynucleotide
  source 1..1302: mol_type = other DNA
atggtttctaaaggtgcggagctgttcaccggtatcgttccgatcctgatcgaactgaacggtgacgtaaacggtcacaaattctctgtttctggtgaaggcgagggtgacgcgacgtacggtaagctgacgctgaagttcatctgcactaccggcaaactgccggttccgtggccgaccctggttaccaccctctcttacggtgttcagtgcttctctcgttacccggaccatatgaaacagcacgacttcttcaaatctgctatgccggaaggttacatccaggaacgtaccatctttttcgaagacgatggtaactataagtctcgtgcagaggttaaattcgagggcgataccctcgtgaaccgcatcgagctgaccggcactgacttcaaggaagacggtaacatcctgggtaacaaaatggaatacaactacaacgctcacaacgtttacatcatgaccgacaaagccaaaaacggtatcaaggttaacttcaaaatccgtcacaacatcgaggatggttctgttcagctggcggaccactaccagcaaaacacccctatcggcgacggtccggtgctgctgccggacaatcactatctgtccacccagtccgcgctgtctaaagaccctaacgaaaaacgtgaccacatgatctacttcggtttcgtgaccgcagcggcaattacccacggtatggacgaactctacaaaggtggctctggtggtggtactagtgttggttcgctaaactgcatcgtcgctgtgtcccagaacatgggcatcggcaagaacacggacctgccctggccaccgctcaggaatgaattcagatatttccagagaatgaccacaacctcttcagtagaaggtaaacagaatctggtgattatgggtaagaagacctggttctccattcctgagaagaatcgacctttaaagggtagaattaatttagttctcagcagagaactcaaggaacctccacaaggagctcattttctttccagaagtctagatgatgccttaaaacttactgaacaaccagaattagcaaataaagtagacatggtctggatagttggtggcagttctgttattaaggaagccatgaatcacccaggccatcttaaactatttgtgacaaggatcatgcaagactttgaaagtgacacgttttttccagaaattgatttggagaaatataaacttctgccagaatacccaggtgttctctctgatgtccaggaggagaaaggcattaagtacaaatttgaagtatatgagaagaatgattga

SEQ ID NO: 161 - DNA, 1302 bp, synthetic construct
  misc_feature 1..1302: note = Description of Artificial Sequence: Synthetic polynucleotide
  source 1..1302: mol_type = other DNA
atggtttctaaaggtgcggagctgttcaccggtatcgttccgatcctgatcgaactgaacggtgacgtaaacggtcacaaattctctgtttctggtgaaggcgagggtgacgcgacgtacggtaagctgacgctgaagttcatctgcactaccggcaaactgccggttccgtggccgaccctggttaccaccctctcttacggtgttcagtgcttctctcgttacccggaccatatgaaacagcacgacttcttcaaatctgctatgccggaaggttacatccaggaacgtaccatctttttcgaagacgatggtaactataagtctcgtgcagaggttaaattcgagggcgataccctcgtgaaccgcatcgagctgaccggcactgacttcaaggaagacggtaacatcctgggtaacaaaatggaatacaactacaacgctcacaacgtttacatcatgaccgacaaagccaaaaacggtatcaaggttaacttcaaaatccgtcacaacatcgaggatggttctgttcagctggcggaccactaccagcaaaacacccctatcggcgacggtccggtgctgctgccggacaatcactatctgtccacccagtccgcgctgtctaaagaccctaacgaaaaacgtgaccacatgatctacttcggtttcgtgaccgcagcggcaattacccacggtatggacgaactctacaaaggtggctctggtggtggtactagtgttggttcgctaaactgcatcgtcgctgtgtcccagaacatgggcatcggcaagaacggggacctgccctggccaccgctcaggaatgaattcagatatttcaagagaatgaccacaacctcttcagtagaaggtaaacagaatctggtgattatgggtaagaagacctggttctccattcctgagaagaatcgacctttaaagggtagaattaatttagttctcagcagagaactcaaggaacctccacaaggagctcattttctttccagaagtctagatgatgccttaaaacttactgaacaaccagaattagcaaataaagtagacatggtctggatagttggtggcagttctgttattaaggaagccatgaatcacccaggccatcttaaactatttgtgacaaggatcatgcaagactttgaaagtgacacgttttttccagaaattgatttggagaaatataaacttctgccagaatacccaggtgttctctctgatgtccaggaggagaaaggcattaagtacaaatttgaagtatatgagaagaatgattga

SEQ ID NO: 162 - DNA, 1302 bp, synthetic construct
  misc_feature 1..1302: note = Description of Artificial Sequence: Synthetic polynucleotide
  source 1..1302: mol_type = other DNA
atggtttctaaaggtgcggagctgttcaccggtatcgttccgatcctgatcgaactgaacggtgacgtaaacggtcacaaattctctgtttctggtgaaggcgagggtgacgcgacgtacggtaagctgacgctgaagttcatctgcactaccggcaaactgccggttccgtggccgaccctggttaccaccctctcttacggtgttcagtgcttctctcgttacccggaccatatgaaacagcacgacttcttcaaatctgctatgccggaaggttacatccaggaacgtaccatctttttcgaagacgatggtaactataagtctcgtgcagaggttaaattcgagggcgataccctcgtgaaccgcatcgagctgaccggcactgacttcaaggaagacggtaacatcctgggtaacaaaatggaatacaactacaacgctcacaacgtttacatcatgaccgacaaagccaaaaacggtatcaaggttaacttcaaaatccgtcacaacatcgaggatggttctgttcagctggcggaccactaccagcaaaacacccctatcggcgacggtccggtgctgctgccggacaatcactatctgtccacccagtccgcgctgtctaaagaccctaacgaaaaacgtgaccacatgatctacttcggtttcgtgaccgcagcggcaattacccacggtatggacgaactctacaaaggtggctctggtggtggtactagtgttggttcgctaaactgcatcgtcgctgtgtcccagaacatgggcatcggcaagaacggggacctgccctggccaccgctcaggaatgaattcagatatttcaagagaatgaccacaacctcttcagtagaaggtaaacagaatctggtgattatgggtaagaagacctggttctccattcctgagaagttccgacctttaaagggtagaattaatttagttctcagcagagaactcaaggaacctccacaaggagctcattttctttccagaagtctagatgatgccttaaaacttactgaacaaccagaattagcaaataaagtagacatggtctggatagttggtggcagttctgttattaaggaagccatgaatcacccaggccatcttaaactatttgtgacaaggatcatgcaagactttgaaagtgacacgttttttccagaaattgatttggagaaatataaacttctgccagaatacccaggtgttctctctgatgtccaggaggagaaaggcattaagtacaaatttgaagtatatgagaagaatgattga

SEQ ID NO: 163 - DNA, 1302 bp, synthetic construct; identical to SEQ ID NO: 161
  misc_feature 1..1302: note = Description of Artificial Sequence: Synthetic polynucleotide
  source 1..1302: mol_type = other DNA

SEQ ID NO: 164 - DNA, 1302 bp, synthetic construct
  misc_feature 1..1302: note = Description of Artificial Sequence: Synthetic polynucleotide
  source 1..1302: mol_type = other DNA
atggtttctaaaggtgcggagctgttcaccggtatcgttccgatcctgatcgaactgaacggtgacgtaaacggtcacaaattctctgtttctggtgaaggcgagggtgacgcgacgtacggtaagctgacgctgaagttcatctgcactaccggcaaactgccggttccgtggccgaccctggttaccaccctctcttacggtgttcagtgcttctctcgttacccggaccatatgaaacagcacgacttcttcaaatctgctatgccggaaggttacatccaggaacgtaccatctttttcgaagacgatggtaactataagtctcgtgcagaggttaaattcgagggcgataccctcgtgaaccgcatcgagctgaccggcactgacttcaaggaagacggtaacatcctgggtaacaaaatggaatacaactacaacgctcacaacgtttacatcatgaccgacaaagccaaaaacggtatcaaggttaacttcaaaatccgtcacaacatcgaggatggttctgttcagctggcggaccactaccagcaaaacacccctatcggcgacggtccggtgctgctgccggacaatcactatctgtccacccagtccgcgctgtctaaagaccctaacgaaaaacgtgaccacatgatctacttcggtttcgtgaccgcagcggcaattacccacggtatggacgaactctacaaaggtggctctggtggtggtactagtgttggttcgctaaactgcatcgtcgctgtgtcccagaacatgggcatcggcaagaacggggacctgccctggccaccgctcaggaatgaattcagatatttccagagaatgaccacaacctcttcagtagaaggtaaacagaatctggtgattatgggtaagaagacctggttctccattcctgagaagaatcgacctttaaagggtagaattaatttagttctcagcagagaactcaaggaacctccacaaggagctcattttctttccagaagtctagatgatgccttaaaacttactgaacaaccagaattagcaaataaagtagacatggtctggatagttggtggcagttctgctattaaggaagccatgaatcacccaggccatcttaaactatttgtgacaaggatcatgcaagactttgaaagtgacacgttttttccagaaattgatttggagaaatataaacttctgccagaatacccaggtgttctctctgatgtccaggaggagaaaggcattaagtacaaatttgaagtatatgagaagaatgattga

SEQ ID NO: 165 - DNA, 2034 bp, synthetic construct
  misc_feature 1..2034: note = Description of Artificial Sequence: Synthetic construct
  source 1..2034: mol_type = other DNA
atggcactgcctgtgaccgccctgctgctgccactggccctgctgctgcacgcagccaggcccgacatccagatgacacagaccacaagctccctgtccgcctctctgggcgacagagtgaccatcagctgccgggcctcccaggatatctctaagtatctgaactggtaccagcagaagcccgatggcacagtgaagctgctgatctatcacaccagccgcctgcactccggagtgccttctaggttcagcggctccggctctggcacagactacagcctgaccatctccaacctggagcaggaggatatcgccacctatttctgccagcagggcaatacactgccttacacctttggcggcggcacaaagctggagatcaccggaggaggaggcagcggaggaggaggctccggcggcggcggctctgaggtgaagctgcaggagtccggaccaggcctggtggcacctagccagtccctgtctgtgacatgtaccgtgtccggcgtgtctctgccagactacggcgtgtcttggatcaggcagccacctaggaagggcctggagtggctgggcgtgatctggggcagcgagacaacatactataattctgccctgaagagcagactgacaatcatcaaggacaacagcaagtcccaggtgttcctgaagatgaatagcctgcagacagacgataccgccatctactattgcgccaagcactactattacggcggcagctatgccatggattactggggccagggcacatccgtgaccgtgtctagcaccacaaccccagcacctcgcccaccaacaccagcaccaaccatcgcatcccagccactgtctctgaggcccgaggcatgtaggcctgcagcaggaggcgccgtgcacaccaggggcctggactttgcctgcgatatctatatctgggcaccactggcaggaacatgtggcgtgctgctgctgtccctggtcatcaccctgtattgcaagagaggccggaagaagctgctgtacatcttcaagcagcccttcatgaggcccgtgcagacaacccaggaggaggacggctgcagctgtcggttcccagaggaggaggagggaggatgtgagctgagggtgaagttttctaggagcgccgatgcaccagcatataagcagggacagaaccagctgtacaacgagctgaatctgggcaggagagaggagtacgacgtgctggataagaggaggggaagggaccccgagatgggaggcaagccaaggagaaagaacccccaggagggcctgtataatgagctgcagaaggacaagatggccgaggcctactccgagatcggcatgaagggagagcggcgcaggggcaagggacacgatggcctgtatcagggcctgtctacagccaccaaggacacctacgatgcactgcacatgcaggccctgcctccaaggggaggcagcggaggagtgggctccctgaactgcatcgtggccgtgagccagaacatgggcatcggcaagaatggcgacctgccttggccacctctgaggaacgagttcagatactttcagaggatgaccacaaccagctccgtggagggcaagcagaacctggtcatcatgggcaagaagacatggttctctatccccgagaagaaccgccctctgaagggccggatcaatctggtgctgagcagagagctgaaggagccaccacagggagcacacttcctgagccggagcctggacgatgccctgaagctgaccgagcagcccgagctggccaacaaggtggacatggtgtggatcgtgggcggctctagcgtgatcaaggaggccatgaatcacccaggccacctgaagctgttcgtgacaagaatcatgcaggactttgagtccgataccttctttcccgagatcgacctggagaagtacaagctgctgcctgagtatccaggcgtgctgtctgatgtgcaggaggagaagggcatcaagtacaagttcgaggtgtatgagaagaatgattga

SEQ ID NO: 166 - DNA, 2034 bp, synthetic construct
  misc_feature 1..2034: note = Description of Artificial Sequence: Synthetic construct
  source 1..2034: mol_type = other DNA
atggcactgcctgtgaccgccctgctgctgccactggccctgctgctgcacgcagccaggcccgacatccagatgacacagaccacaagctccctgtccgcctctctgggcgacagagtgaccatcagctgccgggcctcccaggatatctctaagtatctgaactggtaccagcagaagcccgatggcacagtgaagctgctgatctatcacaccagccgcctgcactccggagtgccttctaggttcagcggctccggctctggcacagactacagcctgaccatctccaacctggagcaggaggatatcgccacctatttctgccagcagggcaatacactgccttacacctttggcggcggcacaaagctggagatcaccggaggaggaggcagcggaggaggaggctccggcggcggcggctctgaggtgaagctgcaggagtccggaccaggcctggtggcacctagccagtccctgtctgtgacatgtaccgtgtccggcgtgtctctgccagactacggcgtgtcttggatcaggcagccacctaggaagggcctggagtggctgggcgtgatctggggcagcgagacaacatactataattctgccctgaagagcagactgacaatcatcaaggacaacagcaagtcccaggtgttcctgaagatgaatagcctgcagacagacgataccgccatctactattgcgccaagcactactattacggcggcagctatgccatggattactggggccagggcacatccgtgaccgtgtctagcaccacaaccccagcacctcgcccaccaacaccagcaccaaccatcgcatcccagccactgtctctgaggcccgaggcatgtaggcctgcagcaggaggcgccgtgcacaccaggggcctggactttgcctgcgatatctatatctgggcaccactggcaggaacatgtggcgtgctgctgctgtccctggtcatcaccctgtattgcaagagaggccggaagaagctgctgtacatcttcaagcagcccttcatgaggcccgtgcagacaacccaggaggaggacggctgcagctgtcggttcccagaggaggaggagggaggatgtgagctgagggtgaagttttctaggagcgccgatgcaccagcatataagcagggacagaaccagctgtacaacgagctgaatctgggcaggagagaggagtacgacgtgctggataagaggaggggaagggaccccgagatgggaggcaagccaaggagaaagaacccccaggagggcctgtataatgagctgcagaaggacaagatggccgaggcctactccgagatcggcatgaagggagagcggcgcaggggcaagggacacgatggcctgtatcagggcctgtctacagccaccaaggacacctacgatgcactgcacatgcaggccctgcctccaaggggaggcagcggaggagtgggctccctgaactgcatcgtggccgtgagccagaacatgggcatcggcaagaatggcgacctgccttggccacctctgaggaacgagttcagatactttcagaggatgaccacaaccagctccgtggagggcaagcagaacctggtcatcatgggcaagaagacatggttctctatccccgagaagaaccgccctctgaagggccggatcaatctggtgctgagcagagagctgaaggagccaccacagggagcacacttcctgagccggagcctggacgatgccctgaagctgaccgagcagcccgagctggccaacaaggtggacatggtgtggatcgtgggcggctctagcgtgatcaaggagttcatgaatcacccaggccacctgaagctgttcgtgacaagaatcatgcaggactttgagtccgataccttctttcccgagatcgacctggagaagtacaagctgctgcctgagtatccaggcgtgctgtctgatgtgcaggaggagaagggcatcaagtacaagttcgaggtgtatgagaagaatgattga

SEQ ID NO: 167 - DNA, 2034 bp, synthetic construct
  misc_feature 1..2034: note = Description of Artificial Sequence: Synthetic construct
  source 1..2034: mol_type = other DNA
atggcactgcctgtgaccgccctgctgctgccactggccctgctgctgcacgcagccaggcccgacatccagatgacacagaccacaagctccctgtccgcctctctgggcgacagagtgaccatcagctgccgggcctcccaggatatctctaagtatctgaactggtaccagcagaagcccgatggcacagtgaagctgctgatctatcacaccagccgcctgcactccggagtgccttctaggttcagcggctccggctctggcacagactacagcctgaccatctccaacctggagcaggaggatatcgccacctatttctgccagcagggcaatacactgccttacacctttggcggcggcacaaagctggagatcaccggaggaggaggcagcggaggaggaggctccggcggcggcggctctgaggtgaagctgcaggagtccggaccaggcctggtggcacctagccagtccctgtctgtgacatgtaccgtgtccggcgtgtctctgccagactacggcgtgtcttggatcaggcagccacctaggaagggcctggagtggctgggcgtgatctggggcagcgagacaacatactataattctgccctgaagagcagactgacaatcatcaaggacaacagcaagtcccaggtgttcctgaagatgaatagcctgcagacagacgataccgccatctactattgcgccaagcactactattacggcggcagctatgccatggattactggggccagggcacatccgtgaccgtgtctagcaccacaaccccagcacctcgcccaccaacaccagcaccaaccatcgcatcccagccactgtctctgaggcccgaggcatgtaggcctgcagcaggaggcgccgtgcacaccaggggcctggactttgcctgcgatatctatatctgggcaccactggcaggaacatgtggcgtgctgctgctgtccctggtcatcaccctgtattgcaagagaggccggaagaagctgctgtacatcttcaagcagcccttcatgaggcccgtgcagacaacccaggaggaggacggctgcagctgtcggttcccagaggaggaggagggaggatgtgagctgagggtgaagttttctaggagcgccgatgcaccagcatataagcagggacagaaccagctgtacaacgagctgaatctgggcaggagagaggagtacgacgtgctggataagaggaggggaagggaccccgagatgggaggcaagccaaggagaaagaacccccaggagggcctgtataatgagctgcagaaggacaagatggccgaggcctactccgagatcggcatgaagggagagcggcgcaggggcaagggacacgatggcctgtatcagggcctgtctacagccaccaaggacacctacgatgcactgcacatgcaggccctgcctccaaggggaggcagcggaggagtgggctccctgaactgcatcgtggccgtgagccagaacatgggcatcggcaagaatggcgacctgccttggccacctctgaggaacgagttcagatactttaagaggatgaccacaaccagctccgtggagggcaagcagaacctggtcatcatgggcaagaagacatggttctctatccccgagaagaaccgccctctgaagggccggatcaatctggtgctgagcagagagctgaaggagccaccacagggagcacacttcctgagccggagcctggacgatgccctgaagctgaccgagcagcccgagctggccaacaaggtggacatggtgtggatcgtgggcggctctagcgtgatcaaggaggccatgaatcacccaggccacctgaagctgttcgtgacaagaatcatgcaggactttgagtccgataccttctttcccgagatcgacctggagaagtacaagctgctgcctgagtatccaggcgtgctgtctgatgtgcaggaggagaagggcatcaagtacaagttcgaggtgtatgagaagaatgattga

SEQ ID NO: 168 - DNA, 345 bp, synthetic construct
  misc_feature 1..345: note = Description of Artificial Sequence: Synthetic construct
  source 1..345: mol_type = other DNA
aactgggtgaatgtaataagtgatttgaaaaaaattgaagatcttattcaatctatgcatattgatgctactttatatacggaaagtgatgttcaccccagttgcaaagtaacagcaatgaagtgctttctcttggagttacaagttatttcacttgagtccggagatgcaagtattcatgatacagtagaaaatctgatcatcctagcaaacaacagtttgtcttctaatgggaatgtaacagaatctggatgcaaagaatgtgaggaactggaggaaaaaaatattaaagaatttttgcagagttttgtacatattgtccaaatgttcatcaacacttcttga

SEQ ID NO: 169 - DNA, 1188 bp, synthetic construct
  misc_feature 1..1188: note = Description of Artificial Sequence: Synthetic construct
  source 1..1188: mol_type = other DNA
atggactggacatggatactcttcctggtagcagccgccacacgagtgcacagcaactgggtgaacgtgatctccgacctgaaaaagatcgaggatttgatccagagcatgcacattgacgccaccctgtataccgagtccgacgtgcacccgagttgcaaggtgactgccatgaagtgcttcctgctggagctgcaagtgatcagcctggagagcggcgacgccagcatccacgacaccgtggaaaaccttatcattctggccaacaatagcctgagcagcaacggcaacgtgaccgaaagcggatgtaaggaatgcgaggaactggaagagaagaatatcaaagaattcctgcaaagcttcgtgcacatcgtgcagatgttcatcaacacttcttcaggtggcggtagtggtgggggaggatctggaggcggaggaagcgggggtggaggttcaggaggagggagcttgcaaattacctgcccccctccgatgagcgtggagcacgccgacatctgggtcaagagctacagcttgtatagtagggagcggtacatctgtaacagcgggttcaagaggaaggccgggaccagctcactgaccgagtgcgtgttgaacaaggccaccaacgtggcccactggaccacccctagccttaagtgcatcagggacccagcgctcgtacaccagagacccgcgcctccctctacggtaaccacggcaggcgtaaccccccagcccgagagcctgtccccgagcggcaaggagcctgcagcgagcagcccctcaagcaacaacacagccgctaccaccgcggcaatcgtgcccggcagccagctgatgccctcaaagagccccagcaccggcaccactgagataagcagccacgagagctcacacggcactccctcacagaccactgccaagaattgggagctgaccgcctctgccagccaccagcccccaggcgtgtatccccagggccacagcgacaccacggtcgccatcagcacatctacagtgcttttgtgcggccttagcgccgtgtcactgctggcatgctacttgaaaagtaggcaaactccccctcttgccagtgtggaaatggaggccatggaagccctgcccgtgacctggggcaccagttctagggacgaggaccttgagaactgctcacatcatttgtga

SEQ ID NO: 170 - DNA, 1752 bp, synthetic construct
  misc_feature 1..1752: note = Description of Artificial Sequence: Synthetic polynucleotide
  source 1..1752: mol_type = other DNA
atggactggacatggatactcttcctggtagcagccgccacacgagtgcacagcaactgggtgaacgtgatctccgacctgaaaaagatcgaggatttgatccagagcatgcacattgacgccaccctgtataccgagtccgacgtgcacccgagttgcaaggtgactgccatgaagtgcttcctgctggagctgcaagtgatcagcctggagagcggcgacgccagcatccacgacaccgtggaaaaccttatcattctggccaacaatagcctgagcagcaacggcaacgtgaccgaaagcggatgtaaggaatgcgaggaactggaagagaagaatatcaaagaattcctgcaaagcttcgtgcacatcgtgcagatgttcatcaacacttcttcaggtggcggtagtggtgggggaggatctggaggcggaggaagcgggggtggaggttcaggaggagggagcttgcaaattacctgcccccctccgatgagcgtggagcacgccgacatctgggtcaagagctacagcttgtatagtagggagcggtacatctgtaacagcgggttcaagaggaaggccgggaccagctcactgaccgagtgcgtgttgaacaaggccaccaacgtggcccactggaccacccctagccttaagtgcatcagggacccagcgctcgtacaccagagacccgcgcctccctctacggtaaccacggcaggcgtaaccccccagcccgagagcctgtccccgagcggcaaggagcctgcagcgagcagcccctcaagcaacaacacagccgctaccaccgcggcaatcgtgcccggcagccagctgatgccctcaaagagccccagcaccggcaccactgagataagcagccacgagagctcacacggcactccctcacagaccactgccaagaattgggagctgaccgcctctgccagccaccagcccccaggcgtgtatccccagggccacagcgacaccacggtcgccatcagcacatctacagtgcttttgtgcggccttagcgccgtgtcactgctggcatgctacttgaaaagtaggcaaactccccctcttgccagtgtggaaatggaggccatggaagccctgcccgtgacctggggcaccagttctagggacgaggaccttgagaactgctcacatcatttgagcggcgttggttcgctaaactgcatcgtcgctgtgtcccagaacatgggcatcggcaagaacggggacctgccctggccaccgctcaggaatgaattcagatatttccagagaatgaccacaacctcttcagtagaaggtaaacagaatctggtgattatgggtaagaagacctggttctccattcctgagaagaatcgacctttaaagggtagaattaatttagttctcagcagagaactcaaggaacctccacaaggagctcattttctttccagaagtctagatgatgccttaaaacttactgaacaaccagaattagcaaataaagtagacatggtctggatagttggtggcagttctgttattaaggaattcatgaatcacccaggccatcttaaactatttgtgacaaggatcatgcaagactttgaaagtgacacgttttttccagaaattgatttggagaaatataaacttctgccagaatacccaggtgttctctctgatgtccaggaggagaaaggcattaagtacaaatttgaagtatatgagaagaatgattga

SEQ ID NO: 171 - DNA, 1752 bp, synthetic construct
  misc_feature 1..1752: note = Description of Artificial Sequence: Synthetic polynucleotide
  source 1..1752: mol_type = other DNA
atggactggacatggatactcttcctggtagcagccgccacacgagtgcacagcaactgggtgaacgtgatctccgacctgaaaaagatcgaggatttgatccagagcatgcacattgacgccaccctgtataccgagtccgacgtgcacccgagttgcaaggtgactgccatgaagtgcttcctgctggagctgcaagtgatcagcctggagagcggcgacgccagcatccacgacaccgtggaaaaccttatcattctggccaacaatagcctgagcagcaacggcaacgtgaccgaaagcggatgtaaggaatgcgaggaactggaagagaagaatatcaaagaattcctgcaaagcttcgtgcacatcgtgcagatgttcatcaacacttcttcaggtggcggtagtggtgggggaggatctggaggcggaggaagcgggggtggaggttcaggaggagggagcttgcaaattacctgcccccctccgatgagcgtggagcacgccgacatctgggtcaagagctacagcttgtatagtagggagcggtacatctgtaacagcgggttcaagaggaaggccgggaccagctcactgaccgagtgcgtgttgaacaaggccaccaacgtggcccactggaccacccctagccttaagtgcatcagggacccagcgctcgtacaccagagacccgcgcctccctctacggtaaccacggcaggcgtaaccccccagcccgagagcctgtccccgagcggcaaggagcctgcagcgagcagcccctcaagcaacaacacagccgctaccaccgcggcaatcgtgcccggcagccagctgatgccctcaaagagccccagcaccggcaccactgagataagcagccacgagagctcacacggcactccctcacagaccactgccaagaattgggagctgaccgcctctgccagccaccagcccccaggcgtgtatccccagggccacagcgacaccacggtcgccatcagcacatctacagtgcttttgtgcggccttagcgccgtgtcactgctggcatgctacttgaaaagtaggcaaactccccctcttgccagtgtggaaatggaggccatggaagccctgcccgtgacctggggcaccagttctagggacgaggaccttgagaactgctcacatcatttgagcggcgttggttcgctaaactgcatcgtcgctgtgtcccagaacatgggcatcggcaagaacggggacctgccctggccaccgctcaggaatgaattcagatatttcttcagaatgaccacaacctcttcagtagaaggtaaacagaatctggtgattatgggtaagaagacctggttctccattcctgagaagttccgacctttaaagggtagaattaatttagttctcagcagagaactcaaggaacctccacaaggagctcattttctttccagaagtctagatgatgccttaaaacttactgaacaaccagaattagcaaataaagtagacatggtctggatagttggtggcagttctgttattaaggaagccatgaatcacccaggccatcttaaactatttgtgacaaggatcatgcaagactttgaaagtgacacgttttttccagaaattgatttggagaaatataaacttctgccagaatacccaggtgttctctctgatgtccaggaggagaaaggcattaagtacaaatttgaagtatatgagaagaatgattga

SEQ ID NO: 172 - DNA, 1623 bp, synthetic construct
  misc_feature 1..1623: note = Description of Artificial Sequence: Synthetic polynucleotide
  source 1..1623: mol_type = other DNA
atgtgccaccaacagctcgtgatcagctggttctccctggtgttcctggctagccccctggtggccatctgggagctcaagaaagacgtgtacgtggtggaactggactggtaccccgacgcccctggcgaaatggtggtgctgacatgcgacacccctgaggaggatggcattacctggaccctcgatcagagctccgaggtgctgggcagcggcaaaaccctgaccatccaggtgaaggagtttggcgatgccggccagtacacatgtcacaagggcggcgaggtgctgagccactccctgctgctgctccacaagaaggaagatggcatctggagcaccgacattctgaaggatcagaaggagcccaagaacaagacattcctgaggtgtgaggccaagaactacagcggcaggtttacctgctggtggctgacaacaatcagcaccgacctcacattctccgtcaagtcctccaggggttcttccgaccctcaaggcgtgacatgcggcgctgccaccctgagcgctgagagagtcaggggcgacaacaaggagtacgagtacagcgtcgaatgtcaggaggacagcgcctgtcccgccgctgaagagagcctgcctatcgaggtgatggtggacgccgtgcacaaactgaagtatgagaattacacctccagcttcttcatcagggacatcatcaaacccgatccccccaagaacctgcagctgaagcctctgaagaacagcagacaggtcgaagtgtcctgggagtaccctgatacctggtccacaccccacagctacttcagcctgaccttttgcgtgcaggtgcagggcaagagcaaaagggagaagaaggacagggtgtttaccgacaagacctccgccacagtgatttgcagaaagaacgcctccatcagcgtgagggcccaggacaggtattacagcagctcctggagcgaatgggctagcgtgccctgtagcggaggaggaggcagcggaggaggaggttctggaggaggcggcagcagaaacctgcctgtcgctacccccgaccccggaatgttcccctgcctgcaccactcccagaacctcctgagggccgtgtccaacatgctgcagaaggctagacagaccctcgaattctacccctgtaccagcgaggagatcgaccatgaggacatcaccaaggataagaccagcaccgtggaggcttgcctgcctctggagctgaccaaaaacgagagctgcctgaacagcagggaaaccagcttcattaccaacggctcctgcctggcctccaggaagacatccttcatgatggccctgtgcctcagcagcatctacgaggacctgaagatgtatcaggtggagtttaagaccatgaatgccaagctgctgatggaccctaagaggcagatcttcctggaccagaatatgctggccgtgattgacgagctgatgcaggccctcaactttaacagcgagaccgtgccccagaaaagcagcctcgaagagcctgacttctacaaaaccaagattaagctgtgtatcctgctgcacgccttcaggatcagggccgtgaccatcgacagggtgatgagctacctgaacgccagctaa

SEQ ID NO: 173 - DNA, 2214 bp, synthetic construct
  misc_feature 1..2214: note = Description of Artificial Sequence: Synthetic polynucleotide
  source 1..2214: mol_type = other DNA
atgtgccaccagcagctggtcatctcctggttctctctggtgtttctggcatctcctctggtggcagtgggcagcctgaactgtatcgtggccgtgtcccagaacatgggcatcggcaagaatggcgatctgccatggccccctctgcggaacgagttcagatacttctttaggatgaccacaaccagctccgtggagggcaagcagaacctggtcatcatgggcaagaagacctggttttctatccccgagaagaacagacctctgaagggcaggatcaatctggtgctgagcagagagctgaaggagccaccacagggagcacacttcctgagccggagcctggacgatgccctgaagctgacagagcagccagagctggccaacaaggtggacatggtgtggatcgtgggcggctctagcgtgatcaaggagtttatgaatcaccccggccacctgaagctgttcgtgaccagaatcatgcaggactttgagtccgatacattctttcctgagatcgatctggagaagtacaagctgctgccagagtatcccggcgtgctgtctgacgtgcaggaggagaagggcatcaagtacaagttcgaggtgtatgagaagaacgatgagtctcggagagtgaggcgcaataagaggagcaagatctgggagctgaagaaggacgtgtacgtggtggagctggactggtatcctgatgccccaggcgagatggtggtgctgacatgcgacacccccgaggaggatggcatcacatggaccctggatcagtcctctgaggtgctgggctccggcaagacactgaccatccaggtgaaggagttcggcgacgccggccagtacacctgtcacaagggaggagaggtgctgagccactccctgctgctgctgcacaagaaggaggacggcatctggtccaccgacatcctgaaggatcagaaggagcccaagaacaagacattcctgagatgcgaggccaagaattatagcggcaggtttacctgttggtggctgacaaccatctccacagatctgaccttttctgtgaagagctcccggggctctagcgaccctcagggagtgacctgcggagcagccacactgtccgccgagcgggtgagaggcgataacaaggagtacgagtattccgtggagtgccaggaggactctgcctgtcctgcagcagaggagagcctgccaatcgaagtgatggtggatgccgtgcacaagctgaagtacgagaattatacctcctctttctttatcagagacatcatcaagccagatcctccaaagaacctgcagctgaagcccctgaagaatagcaggcaggtggaggtgtcctgggagtacccagacacatggagcaccccccacagctatttctccctgacattttgcgtgcaggtgcagggcaagtccaagcgcgagaagaaggaccgggtgttcacagataagacctctgccacagtgatctgtcgcaagaacgcctctatcagcgtgcgcgcccaggatcggtactatagctcctcttggtctgagtgggccagcgtgccttgttccggcggcggcggctctggaggaggaggcagcggcggaggaggctcccggaatctgcctgtggcaacccccgaccctggaatgttcccatgcctgcaccacagccagaacctgctgcgcgccgtgtccaatatgctgcagaaggcccggcagaccctggagttttacccatgtacaagcgaggagatcgaccacgaggatatcaccaaggataagacatccaccgtggaggcatgcctgccactggagctgacaaagaacgagtcttgtctgaacagccgggagacaagcttcatcacaaacggctcttgcctggccagccggaagacctcctttatgatggccctgtgcctgagctccatctacgaggacctgaagatgtatcaggtggagttcaagacaatgaacgccaagctgctgatggaccccaagcgccagatctttctggatcagaatatgctggccgtgatcgacgagctgatgcaggccctgaactttaatagcgagacagtgccccagaagtctagcctggaggagcctgatttctacaagacaaagatcaagctgtgcatcctgctgcacgccttccggatcagagccgtgaccatcgacagagtgatgtcttatctgaatgccagc

SEQ ID NO: 174 - DNA, 2062 bp, synthetic construct
  misc_feature 1..2062: note = Description of Artificial Sequence: Synthetic construct
  source 1..2062: mol_type = other DNA
atggcactgcctgtgaccgccctgctgctgccactggccctgctgctgcacgcagccaggcccagtggagtgggctccctgaactgcatcgtggccgtgagccagaacatgggcatcggcaagaatggcgacctgccttggccacctctgaggaacgagttcagatactttcagaggatgaccacaaccagctccgtggagggcaagcagaacctggtcatcatgggcaagaagacatggttctctatccccgagaagaaccgccctctgaagggccggatcaatctggtgctgagcagagagctgaaggagccaccacagggagcacacttcctgagccggagcctggacgatgccctgaagctgaccgagcagcccgagctggccaacaaggtggacatggtgtggatcgtgggcggctctagcgtgatcaaggagttcatgaatcacccaggccacctgaagctgttcgtgacaagaatcatgcaggactttgagtccgataccttctttcccgagatcgacctggagaagtacaagctgctgcctgagtatccaggcgtgctgtctgatgtgcaggaggagaagggcatcaagtacaagttcgaggtgtatgagaagaatgatgagtccaggagagtgcggcgcaacaagaggagcaaggacatccagatgacacagaccacaagctccctgtccgcctctctgggcgacagagtgaccatcagctgccgggcctcccaggatatctctaagtatctgaactggtaccagcagaagcccgatggcacagtgaagctgctgatctatcacaccagccgcctgcactccggagtgccttctaggttcagcggctccggctctggcacagactacagcctgaccatctccaacctggagcaggaggatatcgccacctatttctgccagcagggcaatacactgccttacacctttggcggcggcacaaagctggagatcaccggaggaggaggcagcggaggaggaggctccggcggcggcggctctgaggtgaagctgcaggagtccggaccaggcctggtggcacctagccagtccctgtctgtgacatgtaccgtgtccggcgtgtctctgccagactacggcgtgtcttggatcaggcagccacctaggaagggcctggagtggctgggcgtgatctggggcagcgagacaacatactataattctgccctgaagagcagactgacaatcatcaaggacaacagcaagtcccaggtgttcctgaagatgaatagcctgcagacagacgataccgccatctactattgcgccaagcactactattacggcggcagctatgccatggattactggggccagggcacatccgtgaccgtgtctagcaccacaaccccagcacctcgcccaccaacaccagcaccaaccatcgcatcccagccactgtctctgaggcccgaggcatgtaggcctgcagcaggaggcgccgtgcacaccaggggcctggactttgcctgcgatatctatatctgggcaccactggcaggaacatgtggcgtgctgctgctgtccctggtcatcaccctgtattgcaagagaggccggaagaagctgctgtacatcttcaagcagcccttcatgaggcccgtgcagacaacccaggaggaggacggctgcagctgtcggttcccagaggaggaggagggaggatgtgagctgagggtgaagttttctaggagcgccgatgcaccagcatataagcagggacagaaccagctgtacaacgagctgaatctgggcaggagagaggagtacgacgtgctggataagaggaggggaagggaccccgagatgggaggcaagccaaggagaaagaacccccaggagggcctgtataatgagctgcagaaggacaagatggccgaggcctactccgagatcggcatgaagggagagcggcgcaggggcaagggacacgatggcctgtatcagggcctgtctacagccaccaaggacacctacgatgcactgcacatgcaggccctgcctccaaggtgag

SEQ ID NO: 175 - DNA, 2062 bp, synthetic construct
  misc_feature 1..2062: note = Description of Artificial Sequence: Synthetic construct
  source 1..2062: mol_type = other DNA
atggcactgcctgtgaccgccctgctgctgccactggccctgctgctgcacgcagccaggcccagtggagtgggctccctgaactgcatcgtggccgtgagccagaacatgggcatcggcaagaatggcgacctgccttggccacctctgaggaacgagttcagatactttaagaggatgaccacaaccagctccgtggagggcaagcagaacctggtcatcatgggcaagaagacatggttctctatccccgagaagaaccgccctctgaagggccggatcaatctggtgctgagcagagagctgaaggagccaccacagggagcacacttcctgagccggagcctggacgatgccctgaagctgaccgagcagcccgagctggccaacaaggtggacatggtgtggatcgtgggcggctctagcgtgatcaaggaggccatgaatcacccaggccacctgaagctgttcgtgacaagaatcatgcaggactttgagtccgataccttctttcccgagatcgacctggagaagtacaagctgctgcctgagtatccaggcgtgctgtctgatgtgcaggaggagaagggcatcaagtacaagttcgaggtgtatgagaagaatgatgagtccaggagagtgcggcgcaacaagaggagcaaggacatccagatgacacagaccacaagctccctgtccgcctctctgggcgacagagtgaccatcagctgccgggcctcccaggatatctctaagtatctgaactggtaccagcagaagcccgatggcacagtgaagctgctgatctatcacaccagccgcctgcactccggagtgccttctaggttcagcggctccggctctggcacagactacagcctgaccatctccaacctggagcaggaggatatcgccacctatttctgccagcagggcaatacactgccttacacctttggcggcggcacaaagctggagatcaccggaggaggaggcagcggaggaggaggctccggcggcggcggctctgaggtgaagctgcaggagtccggaccaggcctggtggcacctagccagtccctgtctgtgacatgtaccgtgtccggcgtgtctctgccagactacggcgtgtcttggatcaggcagccacctaggaagggcctggagtggctgggcgtgatctggggcagcgagacaacatactataattctgccctgaagagcagactgacaatcatcaaggacaacagcaagtcccaggtgttcctgaagatgaatagcctgcagacagacgataccgccatctactattgcgccaagcactactattacggcggcagctatgccatggattactggggccagggcacatccgtgaccgtgtctagcaccacaaccccagcacctcgcccaccaacaccagcaccaaccatcgcatcccagccactgtctctgaggcccgaggcatgtaggcctgcagcaggaggcgccgtgcacaccaggggcctggactttgcctgcgatatctatatctgggcaccactggcaggaacatgtggcgtgctgctgctgtccctggtcatcaccctgtattgcaagagaggccggaagaagctgctgtacatcttcaagcagcccttcatgaggcccgtgcagacaacccaggaggaggacggctgcagctgtcggttcccagaggaggaggagggaggatgtgagctgagggtgaagttttctaggagcgccgatgcaccagcatataagcagggacagaaccagctgtacaacgagctgaatctgggcaggagagaggagtacgacgtgctggataagaggaggggaagggaccccgagatgggaggcaagccaaggagaaagaacccccaggagggcctgtataatgagctgcagaaggacaagatggccgaggcctactccgagatcggcatgaagggagagcggcgcaggggcaagggacacgatggcctgtatcagggcctgtctacagccaccaaggacacctacgatgcactgcacatgcaggccctgcctccaaggtgag

SEQ ID NO: 176 - DNA, 2061 bp, synthetic construct
  misc_feature 1..2061: note = Description of Artificial Sequence: Synthetic construct
  source 1..2061: mol_type = other DNA
atggcactgccagtgaccgccctgctgctgcctctggccctgctgctgcacgcagccagaccaagcggagtgggctccctgaactgcatcgtggccgtgagccagaacatgggcatcggcaagaatggcgacctgccatggccacctctgaggaacgagttcaggtactttcagagaatgaccacaaccagctccgtggagggcaagcagaacctggtcatcatgggcaagaagacctggttcagcatccccgagaagaacaggcctctgaagggcagaatcaatctggtgctgtccagggagctgaaggagccaccacagggagcccactttctgtctcgcagcctggacgatgccctgaagctgacagagcagcccgagctggccaacaaggtggatatggtgtggatcgtgggcggctctagcgtgatcaaggagttcatgaatcaccccggccacctgaagctgttcgtgaccaggatcatgcaggactttgagtccgatacattctttcctgagatcgacctggagaagtataagctgctgccagagtaccccggcgtgctgagcgatgtgcaggaggagaagggcatcaagtataagtttgaggtgtacgagaagaacgacgagtctaggagagtgcggcgcaataagagaagcaaggacatccagatgacacagaccacaagctccctgtccgcctctctgggcgacagagtgaccatcagctgccgggcctcccaggatatctctaagtatctgaactggtaccagcagaagcccgatggcacagtgaagctgctgatctatcacaccagccgcctgcactccggagtgccttctaggttcagcggctccggctctggcacagactacagcctgaccatctccaacctggagcaggaggatatcgccacctatttctgccagcagggcaatacactgccttacacctttggcggcggcacaaagctggagatcaccggaggaggaggcagcggaggaggaggctccggcggcggcggctctgaggtgaagctgcaggagtccggaccaggcctggtggcacctagccagtccctgtctgtgacatgtaccgtgtccggcgtgtctctgccagactacggcgtgtcttggatcaggcagccacctaggaagggcctggagtggctgggcgtgatctggggcagcgagacaacatactataattctgccctgaagagcagactgacaatcatcaaggacaacagcaagtcccaggtgttcctgaagatgaatagcctgcagacagacgataccgccatctactattgcgccaagcactactattacggcggcagctatgccatggattactggggccagggcacatccgtgaccgtgtctagcaccacaaccccagcacctcgcccaccaacaccagcaccaaccatcgcatcccagccactgtctctgaggcccgaggcatgtaggcctgcagcaggaggcgccgtgcacaccaggggcctggactttgcctgcgatatctatatctgggcaccactggcaggaacatgtggcgtgctgctgctgtccctggtcatcaccctgtattgcaagagaggccggaagaagctgctgtacatcttcaagcagcccttcatgaggcccgtgcagacaacccaggaggaggacggctgcagctgtcggttcccagaggaggaggagggaggatgtgagctgagggtgaagttttctaggagcgccgatgcaccagcatataagcagggacagaaccagctgtacaacgagctgaatctgggcaggagagaggagtacgacgtgctggataagaggaggggaagggaccccgagatgggaggcaagccaaggagaaagaacccccaggagggcctgtataatgagctgcagaaggacaagatggccgaggcctactccgagatcggcatgaagggagagcggcgcaggggcaagggacacgatggcctgtatcagggcctgtctacagccaccaaggacacctacgatgcactgcacatgcaggccctgcctccaaggtga

SEQ ID NO: 177 - DNA, 2061 bp, synthetic construct
  misc_feature 1..2061: note = Description of Artificial Sequence: Synthetic construct
  source 1..2061: mol_type = other DNA
atggcactgcctgtgaccgccctgctgctgccactggccctgctgctgcacgcagccaggccaagcggagtgggctccctgaactgcatcgtggccgtgagccagaacatgggcatcggcaagaatggcgacctgccatggccacctctgaggaacgagttcaggtactttaagagaatgaccacaaccagctccgtggagggcaagcagaacctggtcatcatgggcaagaagacctggttcagcatccccgagaagaacaggcctctgaagggcagaatcaatctggtgctgtccagggagctgaaggagccaccacagggagcccactttctgtctcgcagcctggacgatgccctgaagctgacagagcagcccgagctggccaacaaggtggatatggtgtggatcgtgggcggctctagcgtgatcaaggaggccatgaatcaccccggccacctgaagctgttcgtgaccaggatcatgcaggactttgagtccgatacattctttcctgagatcgacctggagaagtataagctgctgccagagtaccccggcgtgctgagcgatgtgcaggaggagaagggcatcaagtataagttcgaggtgtacgagaagaacgacgagtctaggagagtgcggcgcaataagagaagcaaggacatccagatgacacagaccacaagctccctgtccgcctctctgggcgacagagtgaccatcagctgccgggcctcccaggatatctctaagtatctgaactggtaccagcagaagcccgatggcacagtgaagctgctgatctatcacaccagccgcctgcactccggagtgccttctaggttcagcggctccggctctggcacagactacagcctgaccatctccaacctggagcaggaggatatcgccacctatttctgccagcagggcaatacactgccttacacctttggcggcggcacaaagctggagatcaccggaggaggaggcagcggaggaggaggctccggcggcggcggctctgaggtgaagctgcaggagtccggaccaggcctggtggcacctagccagtccctgtctgtgacatgtaccgtgtccggcgtgtctctgccagactacggcgtgtcttggatcaggcagccacctaggaagggcctggagtggctgggcgtgatctggggcagcgagacaacatactataattctgccctgaagagcagactgacaatcatcaaggacaacagcaagtcccaggtgttcctgaagatgaatagcctgcagacagacgataccgccatctactattgcgccaagcactactattacggcggcagctatgccatggattactggggccagggcacatccgtgaccgtgtctagcaccacaaccccagcacctcgcccaccaacaccagcaccaaccatcgcatcccagccactgtctctgaggcccgaggcatgtaggcctgcagcaggaggcgccgtgcacaccaggggcctggactttgcctgcgatatctatatctgggcaccactggcaggaacatgtggcgtgctgctgctgtccctggtcatcaccctgtattgcaagagaggccggaagaagctgctgtacatcttcaagcagcccttcatgaggcccgtgcagacaacccaggaggaggacggctgcagctgtcggttcccagaggaggaggagggaggatgtgagctgagggtgaagttttctaggagcgccgatgcaccagcatataagcagggacagaaccagctgtacaacgagctgaatctgggcaggagagaggagtacgacgtgctggataagaggaggggaagggaccccgagatgggaggcaagccaaggagaaagaacccccaggagggcctgtataatgagctgcagaaggacaagatggccgaggcctactccgagatcggcatgaagggagagcggcgcaggggcaagggacacgatggcctgtatcagggcctgtctacagccaccaaggacacctacgatgcactgcacatgcaggccctgcctccaaggtga

SEQ ID NO: 178 - DNA, 1824 bp, synthetic construct
  misc_feature 1..1824: note = Description of Artificial Sequence: Synthetic polynucleotide
  source 1..1824: mol_type = other DNA
atggttggttcgctaaactgcatcgtcgctgtgtcccagaacatgggcatcggcaagaacggggacctgccctggccaccgctcaggaatgaattcagatatttccagagaatgaccacaacctcttcagtagaaggtaaacagaatctggtgattatgggtaagaagacctggttctccattcctgagaagaatcgacctttaaagggtagaattaatttagttctcagcagagaactcaaggaacctccacaaggagctcattttctttccagaagtctagatgatgccttaaaacttactgaacaaccagaattagcaaataaagtagacatggtctggatagttggtggcagttctgttattaaggaagccatgaatcacccaggccatcttaaactatttgtgacaaggatcatgcaagactttgaaagtgacacgttttttccagaaattgatttggagaaatataaacttctgccagaatacccaggtgttctctctgatgtccaggaggagaaaggcattaagtacaaatttgaagtatatgagaagaatgatagcggcggtggcagcgacgaggccgacagaaggcttttgagaaggtgcaggctccggctggttgaggagctgcaagtcgaccaactgtgggacgccctgctgtccagggaactgtttaggccccacatgatcgaggacatccaaagagccgggtcaggatctaggagggatcaggctaggcaacttattatcgatctggaaaccagggggagccaagcccttcccctcttcatcagctgtctcgaggatacgggccaagacatgctcgccagttttctgagaacgaaccgacaggccgcaaagctgagtaaacccaccctggagaaccttacccctgtggtactcaggcccgaaatccggaagcccgaggtgctgaggccggagactccgaggcccgtggacatcggcagtggggggttcggtgacgtgggagcgctggaaagcctgcgcggcaacgctgacctcgcctacatccttagcatggagccgtgcggacactgtctgatcatcaacaacgtgaacttctgcagggagagcgggctgcggaccaggaccgggagcaatatcgattgcgaaaaactgaggaggaggttcagctcactgcacttcatggtggaggtgaagggcgacctgaccgccaagaagatggttctggccttgcttgagcttgcgcagcaagatcacggtgcccttgactgttgtgtggtggtgatactgagccacggctgtcaggccagccacctgcagtttccgggtgctgtctacgggaccgacgggtgccccgtgtctgtcgaaaagatagtgaacatcttcaacggcacgtcctgcccctcactgggcggcaagcccaagctcttctttatacaggcttgcggtggagagcagaaggaccatggcttcgaggtggccagcaccagccccgaggacgagagccctggtagcaatcccgagcccgatgccaccccatttcaagaaggattgaggaccttcgatcagctcgacgcgattagctctctgcccacccccagcgacatttttgtgagctacagcacgttcccgggtttcgtcagttggagggaccctaagagcggaagctggtatgtggagacgctggacgacatattcgagcaatgggcacacagcgaggatctgcagtcactcctgttgcgcgtggccaacgccgtttccgttaagggcatctataagcagatgccaggttgtttcaatttcctccgaaaaaagttgttctttaagaccagctga

SEQ ID NO: 179 - DNA, 1824 bp, synthetic construct
  misc_feature 1..1824: note = Description of Artificial Sequence: Synthetic polynucleotide
  source 1..1824: mol_type = other DNA
atggttggttcgctaaactgcatcgtcgctgtgtcccagaacatgggcatcggcaagaacggggacctgccctggccaccgctcaggaatgaattcagatatttccagagaatgaccacaacctcttcagtagaaggtaaacagaatctggtgattatgggtaagaagacctggttctccattcctgagaagaatcgacctttaaagggtagaattaatttatttctcagcagagaactcaaggaacctccacaaggagctcattttctttccagaagtctagatgatgccttaaaacttactgaacaaccagaattagcaaataaagtagacatggtctggatagttggtggcagttctgttattaaggaagccatgaatcacccaggccatcttaaactatttgtgacaaggatcatgcaagactttgaaagtgacacgttttttccagaaattgatttggagaaatataaacttctgccagaatacccaggtgttctctctgatgtccaggaggagaaaggcattaagtacaaatttgaagtatatgagaagaatgatagcggcggtggcagcgacgaggccgacagaaggcttttgagaaggtgcaggctccggctggttgaggagctgcaagtcgaccaactgtgggacgccctgctgtccagggaactgtttaggccccacatgatcgaggacatccaaagagccgggtcaggatctaggagggatcaggctaggcaacttattatcgatctggaaaccagggggagccaagcccttcccctcttcatcagctgtctcgaggatacgggccaagacatgctcgccagttttctgagaacgaaccgacaggccgcaaagctgagtaaacccaccctggagaaccttacccctgtggtactcaggcccgaaatccggaagcccgaggtgctgaggccggagactccgaggcccgtggacatcggcagtggggggttcggtgacgtgggagcgctggaaagcctgcgcggcaacgctgacctcgcctacatccttagcatggagccgtgcggacactgtctgatcatcaacaacgtgaacttctgcagggagagcgggctgcggaccaggaccgggagcaatatcgattgcgaaaaactgaggaggaggttcagctcactgcacttcatggtggaggtgaagggcgacctgaccgccaagaagatggttctggccttgcttgagcttgcgcagcaagatcacggtgcccttgactgttgtgtggtggtgatactgagccacggctgtcaggccagccacctgcagtttccgggtgctgtctacgggaccgacgggtgccccgtgtctgtcgaaaagatagtgaacatcttcaacggcacgtcctgcccctcactgggcggcaagcccaagctcttctttatacaggcttgcggtggagagcagaaggaccatggcttcgaggtggccagcaccagccccgaggacgagagccctggtagcaatcccgagcccgatgccaccccatttcaagaaggattgaggaccttcgatcagctcgacgcgattagctctctgcccacccccagcgacatttttgtgagctacagcacgttcccgggtttcgtcagttggagggaccctaagagcggaagctggtatgtggagacgctggacgacatattcgagcaatgggcacacagcgaggatctgcagtcactcctgttgcgcgtggccaacgccgtttccgttaagggcatctataagcagatgccaggttgtttcaatttcctccgaaaaaagttgttctttaagaccagctga

SEQ ID NO: 180 - DNA, 1824 bp, synthetic construct
  misc_feature 1..1824: note = Description of Artificial Sequence: Synthetic polynucleotide
  source 1..1824: mol_type = other DNA
atggttggttcgctaaactgcatcgtcgctgtgtcccagaacatgggcatcggcaagaacggggacctgccctggccaccgctcaggaatgaattcagatatttccagagaatgaccacaacctcttcagtagaaggtaaacagaatctggtgattatgggtaagaagacctggttctccattcctgagaagaatcgacctttaaagggtagaattaatttagttctcagcagagaactcaaggaacctccacaaggagctcattttctttccagaagtgcagatgatgccttaaaacttactgaacaaccagaattagcaaataaagtagacatggtctggatagttggtggcagttctgtttataaggaagccatgaatcacccaggccatcttaaactatttgtgacaaggatcatgcaagactttgaaagtgacgcgttttttccagaaattgatttggagaaatataaacttctgccagaatacccaggtgttctctctgatgtccaggaggagaaaggcattaagtacaaatttgaagtatatgagaagaatgatagcggcggtggcagcgacgaggccgacagaaggcttttgagaaggtgcaggctccggctggttgaggagctgcaagtcgaccaactgtgggacgccctgctgtccagggaactgtttaggccccacatgatcgaggacatccaaagagccgggtcaggatctaggagggatcaggctaggcaacttattatcgatctggaaaccagggggagccaagcccttcccctcttcatcagctgtctcgaggatacgggccaagacatgctcgccagttttctgagaacgaaccgacaggccgcaaagctgagtaaacccaccctggagaaccttacccctgtggtactcaggcccgaaatccggaagcccgaggtgctgaggccggagactccgaggcccgtggacatcggcagtggggggttcggtgacgtgggagcgctggaaagcctgcgcggcaacgctgacctcgcctacatccttagcatggagccgtgcggacactgtctgatcatcaacaacgtgaacttctgcagggagagcgggctgcggaccaggaccgggagcaatatcgattgcgaaaaactgaggaggaggttcagctcactgcacttcatggtggaggtgaagggcgacctgaccgccaagaagatggttctggccttgcttgagcttgcgcagcaagatcacggtgcccttgactgttgtgtggtggtgatactgagccacggctgtcaggccagccacctgcagtttccgggtgctgtctacgggaccgacgggtgccccgtgtctgtcgaaaagatagtgaacatcttcaacggcacgtcctgcccctcactgggcggcaagcccaagctcttctttatacaggcttgcggtggagagcagaaggaccatggcttcgaggtggccagcaccagccccgaggacgagagccctggtagcaatcccgagcccgatgccaccccatttcaagaaggattgaggaccttcgatcagctcgacgcgattagctctctgcccacccccagcgacatttttgtgagctacagcacgttcccgggtttcgtcagttggagggaccctaagagcggaagctggtatgtggagacgctggacgacatattcgagcaatgggcacacagcgaggatctgcagtcactcctgttgcgcgtggccaacgccgtttccgttaagggcatctataagcagatgccaggttgtttcaatttcctccgaaaaaagttgttctttaagaccagctga

SEQ ID NO: 181 - DNA, 2217 bp, synthetic construct
  misc_feature 1..2217: note = Description of Artificial Sequence: Synthetic polynucleotide
  source 1..2217: mol_type = other DNA
atggaagatgccaaaaacattaagaagggcccagcgccattctacccactcgaagacgggaccgccggcgagcagctgcacaaagccatgaagcgctacgccctggtgcccggcaccatcgcctttaccgacgcacatatcgaggtggacattacctacgccgagtacttcgagatgagcgttcggctggcagaagctatgaagcgctatgggctgaatacaaaccatcggatcgtggtgtgcagcgagaatagcttgcagttcttcatgcccgtgttgggtgccctgttcatcggtgtggctgtggccccagctaacgacatctacaacgagcgcgagctgctgaacagcatgggcatcagccagcccaccgtcgtattcgtgagcaagaaagggctgcaaaagatcctcaacgtgcaaaagaagctaccgatcatacaaaagatcatcatcatggatagcaagaccgactaccagggcttccaaagcatgtacaccttcgtgacttcccatttgccacccggcttcaacgagtacgacttcgtgcccgagagcttcgaccgggacaaaaccatcgccctgatcatgaacagtagtggcagtaccggattgcccaagggcgtagccctaccgcaccgcaccgcttgtgtccgattcagtcatgcccgcgaccccatcttcggcaaccagatcatccccgacaccgctatcctcagcgtggtgccatttcaccacggcttcggcatgttcaccacgctgggctacttgatctgcggctttcgggtcgtgctcatgtaccgcttcgaggaggagctattcttgcgcagcttgcaagactataagattcaatctgccctgctggtgcccacactatttagcttcttcgctaagagcactctcatcgacaagtacgacctaagcaacttgcacgagatcgccagcggcggggcgccgctcagcaaggaggtaggtgaggccgtggccaaacgcttccacctaccaggcatccgccagggctacggcctgacagaaacaaccagcgccattctgatcacccccgaaggggacgacaagcctggcgcagtaggcaaggtggtgcccttcttcgaggctaaggtggtggacttggacaccggtaagacactgggtgtgaaccagcgcggcgagctgtgcgtccgtggccccatgatcatgagcggctacgttaacaaccccgaggctacaaacgctctcatcgacaaggacggctggctgcacagcggcgacatcgcctactgggacgaggacgagcacttcttcatcgtggaccggctgaagagcctgatcaaatacaagggctaccaggtagccccagccgaactggagagcatcctgctgcaacaccccaacatcttcgacgccggggtcgccggcctgcccgacgacgatgccggcgagctgcccgccgcagtcgtcgtgctggaacacggtaaaaccatgaccgagaaggagatcgtggactatgtggccagccaggttacaaccgccaagaagctgcgcggtggtgttgtgttcgtggacgaggtgcctaaaggactgaccggcaagttggacgcccgcaagatccgcgagattctcattaaggccaagaagggcggcaagatcgccgtgagtggtgttggttcgctaaactgcatcgtcgctgtgtcccagaacatgggcatcggcaagaacggggacctgccctggccaccgctcaggaatgaattcagatatttccagagaatgaccacaacctcttcagtagaaggtaaacagaatctggtgattatgggtaagaagacctggttctccattcctgagaagaatcgacctttaaagggtagaattaatttagttctcagcagagaactcaaggaacctccacaaggagctcattttctttccagaagtctagatgatgccttaaaacttactgaacaaccagaattagcaaataaagtagacatggtctggatagttggtggcagttctgtttataaggaagccatgaatcacccaggccatcttaaactatttgtgacaaggatcatgcaagactttgaaagtgacacgttttttccagaaattgatttggagaaatataaacttctgccagaatacccaggtgttctctctgatgtccaggaggagaaaggcattaagtacaaatttgaagtatatgagaaggatgattaa

SEQ ID NO: 182 - DNA, 2217 bp, synthetic construct
  misc_feature 1..2217: note = Description of Artificial Sequence: Synthetic polynucleotide
  source 1..2217: mol_type = other DNA
atggaagatgccaaaaacattaagaagggcccagcgccattctacccactcgaagacgggaccgccggcgagcagctgcacaaagccatgaagcgctacgccctggtgcccggcaccatcgcctttaccgacgcacatatcgaggtggacattacctacgccgagtacttcgagatgagcgttcggctggcagaagctatgaagcgctatgggctgaatacaaaccatcggatcgtggtgtgcagcgagaatagcttgcagttcttcatgcccgtgttgggtgccctgttcatcggtgtggctgtggccccagctaacgacatctacaacgagcgcgagctgctgaacagcatgggcatcagccagcccaccgtcgtattcgtgagcaagaaagggctgcaaaagatcctcaacgtgcaaaagaagctaccgatcatacaaaagatcatcatcatggatagcaagaccgactaccagggcttccaaagcatgtacaccttcgtgacttcccatttgccacccggcttcaacgagtacgacttcgtgcccgagagcttcgaccgggacaaaaccatcgccctgatcatgaacagtagtggcagtaccggattgcccaagggcgtagccctaccgcaccgcaccgcttgtgtccgattcagtcatgcccgcgaccccatcttcggcaaccagatcatccccgacaccgctatcctcagcgtggtgccatttcaccacggcttcggcatgttcaccacgctgggctacttgatctgcggctttcgggtcgtgctcatgtaccgcttcgaggaggagctattcttgcgcagcttgcaagactataagattcaatctgccctgctggtgcccacactatttagcttcttcgctaagagcactctcatcgacaagtacgacctaagcaacttgcacgagatcgccagcggcggggcgccgctcagcaaggaggtaggtgaggccgtggccaaacgcttccacctaccaggcatccgccagggctacggcctgacagaaacaaccagcgccattctgatcacccccgaaggggacgacaagcctggcgcagtaggcaaggtggtgcccttcttcgaggctaaggtggtggacttggacaccggtaagacactgggtgtgaaccagcgcggcgagctgtgcgtccgtggccccatgatcatgagcggctacgttaacaaccccgaggctacaaacgctctcatcgacaaggacggctggctgcacagcggcgacatcgcctactgggacgaggacgagcacttcttcatcgtggaccggctgaagagcctgatcaaatacaagggctaccaggtagccccagccgaactggagagcatcctgctgcaacaccccaacatcttcgacgccggggtcgccggcctgcccgacgacgatgccggcgagctgcccgccgcagtcgtcgtgctggaacacggtaaaaccatgaccgagaaggagatcgtggactatgtggccagccaggttacaaccgccaagaagctgcgcggtggtgttgtgttcgtggacgaggtgcctaaaggactgaccggcaagttggacgcccgcaagatccgcgagattctcattaaggccaagaagggcggcaagatcgccgtgagtggtgttggttcgctaaactgcatcgtcgctgtgtcccagaacatgggcatcggcaagaacggggacctgccctggccaccgctcaggaatgaattcagatatttccagagaatgaccacaacctcttcagtagaaggtaaacagaatctggtgattatgggtaagaagacctggttctccattcctgagaagaatcgacctttaaagggtagaattaatttagttctcagcagagaactcaaggaacctccacaaggagctcattttctttccagaagtctagatgatgccttaaaacttactgaacaaccagaattagcaaataaagtagacatggtctggatagttggtggcagttctgtttataaggaagccatgaatcacccaggccatcttaaactatttgtgacaaggatcattcaagactttgaaagtgacacgttttttccagaaattgatttggagaaatataaacttctgccagaatacccaggtgttctctctgatgtccaggaggagaaaggcattaagtacaaatttgaagtatatgagaagaatgattaa

SEQ ID NO: 183 - DNA, 2217 bp, synthetic construct
  misc_feature 1..2217: note = Description of Artificial Sequence: Synthetic polynucleotide
  source 1..2217: mol_type = other DNA
atggaagatgccaaaaacattaagaagggcccagcgccattctacccactcgaagacgggaccgccggcgagcagctgcacaaagccatgaagcgctacgccctggtgcccggcaccatcgcctttaccgacgcacatatcgaggtggacattacctacgccgagtacttcgagatgagcgttcggctggcagaagctatgaagcgctatgggctgaatacaaaccatcggatcgtggtgtgcagcgagaatagcttgcagttcttcatgcccgtgttgggtgccctgttcatcggtgtggctgtggccccagctaacgacatctacaacgagcgcgagctgctgaacagcatgggcatcagccagcccaccgtcgtattcgtgagcaagaaagggctgcaaaagatcctcaacgtgcaaaagaagctaccgatcatacaaaagatcatcatcatggatagcaagaccgactaccagggcttccaaagcatgtacaccttcgtgacttcccatttgccacccggcttcaacgagtacgacttcgtgcccgagagcttcgaccgggacaaaaccatcgccctgatcatgaacagtagtggcagtaccggattgcccaagggcgtagccctaccgcaccgcaccgcttgtgtccgattcagtcatgcccgcgaccccatcttcggcaaccagatcatccccgacaccgctatcctcagcgtggtgccatttcaccacggcttcggcatgttcaccacgctgggctacttgatctgcggctttcgggtcgtgctcatgtaccgcttcgaggaggagctattcttgcgcagcttgcaagactataagattcaatctgccctgctggtgcccacactatttagcttcttcgctaagagcactctcatcgacaagtacgacctaagcaacttgcacgagatcgccagcggcggggcgccgctcagcaaggaggtaggtgaggccgtggccaaacgcttccacctaccaggcatccgccagggctacggcctgacagaaacaaccagcgccattctgatcacccccgaaggggacgacaagcctggcgcagtaggcaaggtggtgcccttcttcgaggctaaggtggtggacttggacaccggtaagacactgggtgtgaaccagcgcggcgagctgtgcgtccgtggccccatgatcatgagcggctacgttaacaaccccgaggctacaaacgctctcatcgacaaggacggctggctgcacagcggcgacatcgcctactgggacgaggacgagcacttcttcatcgtggaccggctgaagagcctgatcaaatacaagggctaccaggtagccccagccgaactggagagcatcctgctgcaacaccccaacatcttcgacgccggggtcgccggcctgcccgacgacgatgccggcgagctgcccgccgcagtcgtcgtgctggaacacggtaaaaccatgaccgagaaggagatcgtggactatgtggccagccaggttacaaccgccaagaagctgcgcggtggtgttgtgttcgtggacgaggtgcctaaaggactgaccggcaagttggacgcccgcaagatccgcgagattctcattaaggccaagaagggcggcaagatcgccgtgagtggtgttggttcgctaaactgcatcgtcgctgtgtcccagaacatgggcatcggcaagaacggggacctgccctggccaccgctcaggaatgaattcagatatttccagagaatgaccacaacctcttcagtagaaggtaaacagaatctggtgattatgggtaagaagacctggttctccattcctgagaagaatcgacctttaaagggtagaattaatttagttctcagcagagaactcaaggaacctccacaaggagctcattttctttccagaagtctagatgatgccttaaaacttactgaacaaccagaattagcaaataaagtagacatggtctggatagttggtggcagttctgtttataaggaagccatgtatcacccaggccatcttaaactatttgtgacaaggatcatgcaagactttgaaagtgacacgttttttccagaaattgatttggagaaatataaacttctgccagaatacccaggtgttctctctgatgtccaggaggagaaaggcattaagtacaaatttgaagtatatgagaagaatgattaa

SEQ ID NO: 184 - DNA, 2217 bp, synthetic construct
  misc_feature 1..2217: note = Description of Artificial Sequence: Synthetic polynucleotide
  source 1..2217: mol_type = other DNA
atggaagatgccaaaaacattaagaagggcccagcgccattctacccactcgaagacgggaccgccggcgagcagctgcacaaagccatgaagcgctacgccctggtgcccggcaccatcgcctttaccgacgcacatatcgaggtggacattacctacgccgagtacttcgagatgagcgttcggctggcagaagctatgaagcgctatgggctgaatacaaaccatcggatcgtggtgtgcagcgagaatagcttgcagttcttcatgcccgtgttgggtgccctgttcatcggtgtggctgtggccccagctaacgacatctacaacgagcgcgagctgctgaacagcatgggcatcagccagcccaccgtcgtattcgtgagcaagaaagggctgcaaaagatcctcaacgtgcaaaagaagctaccgatcatacaaaagatcatcatcatggatagcaagaccgactaccagggcttccaaagcatgtacaccttcgtgacttcccatttgccacccggcttcaacgagtacgacttcgtgcccgagagcttcgaccgggacaaaaccatcgccctgatcatgaacagtagtggcagtaccggattgcccaagggcgtagccctaccgcaccgcaccgcttgtgtccgattcagtcatgcccgcgaccccatcttcggcaaccagatcatccccgacaccgctatcctcagcgtggtgccatttcaccacggcttcggcatgttcaccacgctgggctacttgatctgcggctttcgggtcgtgctcatgtaccgcttcgaggaggagctattcttgcgcagcttgcaagactataagattcaatctgccctgctggtgcccacactatttagcttcttcgctaagagcactctcatcgacaagtacgacctaagcaacttgcacgagatcgccagcggcggggcgccgctcagcaaggaggtaggtgaggccgtggccaaacgcttccacctaccaggcatccgccagggctacggcctgacagaaacaaccagcgccattctgatcacccccgaaggggacgacaagcctggcgcagtaggcaaggtggtgcccttcttcgaggctaaggtggtggacttggacaccggtaagacactgggtgtgaaccagcgcggcgagctgtgcgtccgtggccccatgatcatgagcggctacgttaacaaccccgaggctacaaacgctctcatcgacaaggacggctggctgcacagcggcgacatcgcctactgggacgaggacgagcacttcttcatcgtggaccggctgaagagcctgatcaaatacaagggctaccaggtagccccagccgaactggagagcatcctgctgcaacaccccaacatcttcgacgccggggtcgccggcctgcccgacgacgatgccggcgagctgcccgccgcagtcgtcgtgctggaacacggtaaaaccatgaccgagaaggagatcgtggactatgtggccagccaggttacaaccgccaagaagctgcgcggtggtgttgtgttcgtggacgaggtgcctaaaggactgaccggcaagttggacgcccgcaagatccgcgagattctcattaaggccaagaagggcggcaagatcgccgtgagtggtgttggttcgctaaactgcatcgtcgctgtgtcccagaacatgggcatcggcaagaacggggacctgccctggccaccgctcaggaatgaattcagatatttccagagaatgaccacaacctcttcagtagaaggtaaacagaatctggtgattatgggtaagaagacctggttctccattcctgagaagaatcgacctttaaagggtagaattaatttagttctcagcagagaactcaaggaacctccacaaggagctcattttctttccagaagtctagatgatgccttaaaacttactgaacaaccagaattagcaaataaagtagacatggtctggatagttggtggcagttctgttattaaggaagccatgaatcacccaggccatcttaaactatttgtgacaaggatcatgcaagactttgaaagtgacacgttttttccagaaattgatttggagaaatataaacttctgccagaatacccaggtgttctctctgatgtccaggaggagaaaggcattaagtacaaatttgaagtatatgagaagaatgattaa

SEQ ID NO: 185 - DNA, 1281 bp, synthetic construct
  misc_feature 1..1281: note = Description of Artificial Sequence: Synthetic polynucleotide
  source 1..1281: mol_type = other DNA
atggtgagcaagggcgccgagctgttcaccggcatcgtgcccatcctgatcgagctgaatggcgatgtgaatggccacaagttcagcgtgagcggcgagggcgagggcgatgccacctacggcaagctgaccctgaagttcatctgcaccaccggcaagctgcctgtgccctggcccaccctggtgaccaccctgagctacggcgtgcagtgcttctcacgctaccccgatcacatgaagcagcacgacttcttcaagagcgccatgcctgagggctacatccaggagcgcaccatcttcttcgaggatgacggcaactacaagtcgcgcgccgaggtgaagttcgagggcgataccctggtgaatcgcatcgagctgaccggcaccgatttcaaggaggatggcaacatcctgggcaataagatggagtacaactacaacgcccacaatgtgtacatcatgaccgacaaggccaagaatggcatcaaggtgaacttcaagatccgccacaacatcgaggatggcagcgtgcagctggccgaccactaccagcagaatacccccatcggcgatggccctgtgctgctgcccgataaccactacctgtccacccagagcgccctgtccaaggaccccaacgagaagcgcgatcacatgatctacttcggcttcgtgaccgccgccgccatcacccacggcatggatgagctgtacaagggatccgttggttcgctaaactgcatcgtcgctgtgtcccagaacatgggcatcggcaagaacggggacctgccctggccaccgctcaggaatgaattcagatatttccagagaatgaccacaacctcttcagtagaaggtaaacagaatctggtgattatgggtaagaagacctggttctccattcctgagaagaatcgacctttaaagggtagaattaatttagttctcagcagagaactcaaggaacctccacaaggagctcattttctttccagaagtctagatgatgccttaaaacttactgaacaaccagaattagcaaataaagtagacatggtctggatagttggtggcagttctgttattaaggaagccatgaatcacccaggccatcttaaactatttgtgacaaggatcatgcaagactttgaaagtgacacgttttttccagaaattgatttggagaaatataaacttctgccagaatacccaggtgttctctctgatgtccaggaggagaaaggcattaagtacaaatttgaagtatatgagaagaatgat

SEQ ID NO: 186 - DNA, 1302 bp, synthetic construct
  misc_feature 1..1302: note = Description of Artificial Sequence: Synthetic construct
  source 1..1302: mol_type = other DNA
atggtttctaaaggtgcggagctgttcaccggtatcgttccgatcctgatcgaactgaacggtgacgtaaacggtcacaaattctctgtttctggtgaaggcgagggtgacgcgacgtacggtaagctgacgctgaagttcatctgcactaccggcaaactgccggttccgtggccgaccctggttaccaccctctcttacggtgttcagtgcttctctcgttacccggaccatatgaaacagcacgacttcttcaaatctgctatgccggaaggttacatccaggaacgtaccatctttttcgaagacgatggtaactataagtctcgtgcagaggttaaattcgagggcgataccctcgtgaaccgcatcgagctgaccggcactgacttcaaggaagacggtaacatcctgggtaacaaaatggaatacaactacaacgctcacaacgtttacatcatgaccgacaaagccaaaaacggtatcaaggttaacttcaaaatccgtcacaacatcgaggatggttctgttcagctggcggaccactaccagcaaaacacccctatcggcgacggtccggtgctgctgccggacaatcactatctgtccacccagtccgcgctgtctaaagaccctaacgaaaaacgtgaccacatgatctacttcggtttcgtgaccgcagcggcaattacccacggtatggacgaactctacaaaggtggctctggtggtggtactagtgttggttcgctaaactgcatcgtcgctgtgtcccagaacatgggcatcggcaagaacgggtccctgccctggccaccgctcaggaatgaaatgagctatttctcgagaatgaccacaacctcttcagtagaaggtaaacagaatctggtgattatgggtaagaagacctggttctccattcctgagaagagtcgacctttaaagggtagaattaatttagttctcagcagagaactcaaggaacctccacaaggagctcattttctttccagaagtctagatgatgccttaaaacttactgaacaaccagaattagcaaataaagtagacatggtctggatagttggtggcagttctgtttataaggaagccatgaatcacccaggccatcttaaactatttgtgacaaggatcatgcaagactttgaaagtgacacgttttttccagaaattgatttggagaaatataaacttctgccagaatacccaggtgttctctctgatgtccaggaggagaaaggcattaagtacaaatttgaagtatatgagaagaatgattga

SEQ ID NO: 187 - DNA, 1302 bp, synthetic construct
  misc_feature 1..1302: note = Description of Artificial Sequence: Synthetic construct
  source 1..1302: mol_type = other DNA
atggtttctaaaggtgcggagctgttcaccggtatcgttccgatcctgatcgaactgaacggtgacgtaaacggtcacaaattctctgtttctggtgaaggcgagggtgacgcgacgtacggtaagctgacgctgaagttcatctgcactaccggcaaactgccggttccgtggccgaccctggttaccaccctctcttacggtgttcagtgcttctctcgttacccggaccatatgaaacagcacgacttcttcaaatctgctatgccggaaggttacatccaggaacgtaccatctttttcgaagacgatggtaactataagtctcgtgcagaggttaaattcgagggcgataccctcgtgaaccgcatcgagctgaccggcactgacttcaaggaagacggtaacatcctgggtaacaaaatggaatacaactacaacgctcacaacgtttacatcatgaccgacaaagccaaaaacggtatcaaggttaacttcaaaatccgtcacaacatcgaggatggttctgttcagctggcggaccactaccagcaaaacacccctatcggcgacggtccggtgctgctgccggacaatcactatctgtccacccagtccgcgctgtctaaagaccctaacgaaaaacgtgaccacatgatctacttcggtttcgtgaccgcagcggcaattacccacggtatggacgaactctacaaaggtggctctggtggtggtactagtgttggttcgctaaactgcatcgtcgctgtgtcccagaacatgggcatcggcaagaacggggacctgccctggccaccgctcaggaatgatatgagatatttccagagaatgaccacaacctcttcagtagaaggtaaacagaatctggtgattatgggtaagaagacctggttctccattcctgagaagaatcgacctttaaagggtagaattaatttagttctcagcagagaactcaaggaacctccacaaggagctcattttctttccagaagtctagatgatgccttaaaacttactgaacaaccagaattagcaaataaagtagacatggtctggataattggtggcagttctgtttataaggaagccatgaatcacccaggccatcttaaactatttgtgacaaggatcatgcaagactttgaaagtgacacgttttttccagaaattgatttggagaaatataaacttctgccagaatacccaggtgttctctctgatgtccaggaggagaaaggcattaagtacaaatttgaagtatatgagaagaatgattga

SEQ ID NO: 188 - DNA, 1302 bp, synthetic construct
  misc_feature 1..1302: note = Description of Artificial Sequence: Synthetic construct
  source 1..1302: mol_type = other DNA
atggtttctaaaggtgcggagctgttcaccggtatcgttccgatcctgatcgaactgaacggtgacgtaaacggtcacaaattctctgtttctggtgaaggcgagggtgacgcgacgtacggtaagctgacgctgaagttcatctgcactaccggcaaactgccggttccgtggccgaccctggttaccaccctctcttacggtgttcagtgcttctctcgttacccggaccatatgaaacagcacgacttcttcaaatctgctatgccggaaggttacatccaggaacgtaccatctttttcgaagacgatggtaactataagtctcgtgcagaggttaaattcgagggcgataccctcgtgaaccgcatcgagctgaccggcactgacttcaaggaagacggtaacatcctgggtaacaaaatggaatacaactacaacgctcacaacgtttacatcatgaccgacaaagccaaaaacggtatcaaggttaacttcaaaatccgtcacaacatcgaggatggttctgttcagctggcggaccactaccagcaaaacacccctatcggcgacggtccggtgctgctgccggacaatcactatctgtccacccagtccgcgctgtctaaagaccctaacgaaaaacgtgaccacatgatctacttcggtttcgtgaccgcagcggcaattacccacggtatggacgaactctacaaaggtggctctggtggtggtactagtgttggttcgctaaactgcatcgtcgctgtgtcccagaacatgggcgtcggcaagaacggggacctgccctggccaccgctcaggaatgaattcagatatttccagagaatgaccacaacctcttcagtagaaggtaaacagaatctggtgattatgggtaagaagacctggttctccattcctgagaagaatcgacctttaaagggtagaattaatttagttctcagcagagaactcaaggaacctccacaaggagctcattttctttccagaagtctagatgatgccttaaaacttactgaacaaccagaattagcaaataaagtagacatggtctggatagttggtggcagttctgttattaaggaagccatgaatcacccaggccatcttaaactatttgtgacaaggatcatgcaagactttgaaagtgacacgttttttccagaaattgatttggagaaatataaacttctgccagaatacccaggtgttctctctgatgtccaggaggagaaaggcattaagtacaaatttgaagtatatgagaagaatgattga

SEQ ID NO: 189 - DNA, 1302 bp, synthetic construct
  misc_feature 1..1302: note = Description of Artificial Sequence: Synthetic construct
  source 1..1302: mol_type = other DNA
atggtttctaaaggtgcggagctgttcaccggtatcgttccgatcctgatcgaactgaacggtgacgtaaacggtcacaaattctctgtttctggtgaaggcgagggtgacgcgacgtacggtaagctgacgctgaagttcatctgcactaccggcaaactgccggttccgtggccgaccctggttaccaccctctcttacggtgttcagtgcttctctcgttacccggaccatatgaaacagcacgacttcttcaaatctgctatgccggaaggttacatccaggaacgtaccatctttttcgaagacgatggtaactataagtctcgtgcagaggttaaattcgagggcgataccctcgtgaaccgcatcgagctgaccggcactgacttcaaggaagacggtaacatcctgggtaacaaaatggaatacaactacaacgctcacaacgtttacatcatgaccgacaaagccaaaaacggtatcaaggttaacttcaaaatccgtcacaacatcgaggatggttctgttcagctggcggaccactaccagcaaaacacccctatcggcgacggtccggtgctgctgccggacaatcactatctgtccacccagtccgcgctgtctaaagaccctaacgaaaaacgtgaccacatgatctacttcggtttcgtgaccgcagcggcaattacccacggtatggacgaactctacaaaggtggctctggtggtggtactagtgttggttcgctaaactgcatcgtcgctgtgtcccagaacatgggcatcggcaagaacggggacctgccctggccaccgctcaggaatgaattcagatatttccagagaatgaccacaacctcttcagtagaaggtaaacagaatctggtgattatgggtaagaagacctggttctccattcctgagaagaatcgacctttaaagggtagaattaatttagttctcagcagagaactcaaggaacctccacaaggagctcattttctttccagaagtctagatgatgccttaaaacttactgaacaaccagaattagcaaataaagtagacatggtctggatagttggtggcagttctgttattaaggaagccatgaatcacccaggccatcttaaactatttgtgacaaggatcatccaagactttgaaagtgacacgttttttccagaaattgatttggagaaatataaacttctgccagaatacccaggtgttctctctgatgtccaggaggagaaaggcattaagtacaaatttgaagtatatgagaagaatgattga

SEQ ID NO: 190 - DNA, 1302 bp, synthetic construct
  misc_feature 1..1302: note = Description of Artificial Sequence: Synthetic construct
  source 1..1302: mol_type = other DNA
atggtttctaaaggtgcggagctgttcaccggtatcgttccgatcctgatcgaactgaacggtgacgtaaacggtcacaaattctctgtttctggtgaaggcgagggtgacgcgacgtacggtaagctgacgctgaagttcatctgcactaccggcaaactgccggttccgtggccgaccctggttaccaccctctcttacggtgttcagtgcttctctcgttacccggaccatatgaaacagcacgacttcttcaaatctgctatgccggaaggttacatccaggaacgtaccatctttttcgaagacgatggtaactataagtctcgtgcagaggttaaattcgagggcgataccctcgtgaaccgcatcgagctgaccggcactgacttcaaggaagacggtaacatcctgggtaacaaaatggaatacaactacaacgctcacaacgtttacatcatgaccgacaaagccaaaaacggtatcaaggttaacttcaaaatccgtcacaacatcgaggatggttctgttcagctggcggaccactaccagcaaaacacccctatcggcgacggtccggtgctgctgccggacaatcactatctgtccacccagtccgcgctgtctaaagaccctaacgaaaaacgtgaccacatgatctacttcggtttcgtgaccgcagcggcaattacccacggtatggacgaactctacaaaggtggctctggtggtggtactagtgttggttcgctaaactgcatcgtcgctgtgtcccagaacatgggcatcggcaagaacggggacctgccctggccaccgctcaggaatgaattcagatatttccagagaatgaccacaacctcttcagtagaaggtaaacagaatctggtgattatgggtaagaagacctggttctccattcctgagaagaatcgacctttaaagggtagaattaatttagttctcagcagagaactcaaggaacctccacaaggagctcattttctttccagaagtctagatgatgccttaaaacttactgaacaaccagaattagcaaataaagtagacatggtctggatagttggtggcagttctgttattaaggaagccatgtatcacccaggccatcttaaactatttgtgacaaggatcatgcaagactttgaaagtgacacgttttttccagaaattgatttggagaaatataaacttctgccagaatacccaggtgttctctctgatgtccaggaggagaaaggcattaagtacaaatttgaagtatatgagaagaatgattga

SEQ ID NO: 191 - DNA, 1302 bp, synthetic construct
  misc_feature 1..1302: note = Description of Artificial Sequence: Synthetic construct
  source 1..1302: mol_type = other DNA
atggtttctaaaggtgcggagctgttcaccggtatcgttccgatcctgatcgaactgaacggtgacgtaaacggtcacaaattctctgtttctggtgaaggcgagggtgacgcgacgtacggtaagctgacgctgaagttcatctgcactaccggcaaactgccggttccgtggccgaccctggttaccaccctctcttacggtgttcagtgcttctctcgttacccggaccatatgaaacagcacgacttcttcaaatctgctatgccggaaggttacatccaggaacgtaccatctttttcgaagacgatggtaactataagtctcgtgcagaggttaaattcgagggcgataccctcgtgaaccgcatcgagctgaccggcactgacttcaaggaagacggtaacatcctgggtaacaaaatggaatacaactacaacgctcacaacgtttacatcatgaccgacaaagccaaaaacggtatcaaggttaacttcaaaatccgtcacaacatcgaggatggttctgttcagctggcggaccactaccagcaaaacacccctatcggcgacggtccggtgctgctgccggacaatcactatctgtccacccagtccgcgctgtctaaagaccctaacgaaaaacgtgaccacatgatctacttcggtttcgtgaccgcagcggcaattacccacggtatggacgaactctacaaaggtggctctggtggtggtactagtgttggttcgctaaactgcatcgtcgctgtgtcccagaacatgggcatcggcaagaacggggacctgccctggccaccgctcaggaatgaattcagatatttccagagaatgaccacaacctcttcagtagaaggtaaacagaatctggtgattatgggtaagaagacctggttctccattcctgagaagaatcgacctttaaagggtagaattaatttagttctcagcagagaactcaaggaacctccacaaggagctcattttctttccagaagtctagatgatgccttaaaacttactgaacaaccagaattagcaaataaagtagacatggtctggatagttggtggcagttctgttattaaggaagccatgaatcacccaggccgtcttaaactatttgtgacaaggatcatgcaagactttggaagtgacacgttttttccagaaattgatttggagaaatataaacttctgccagaatacccaggtgttctctctgatgtccaggaggagaaaggcattaagtacaaatttgaagtatatgagaagaatgattga

SEQ ID NO: 192 - protein, 107 aa, Homo sapiens
GVQVETISPGDGRTFPKRGQTCVVHYTGMLEDGKKFDSSRDRNKPFKFMLGKQEVIRGWEEGVAQMSVGQRAKLTISPDYAYGATGHPGIIPPHATLVFDVELLKLE

SEQ ID NO: 193 - protein, 187 aa, Homo sapiens; identical to SEQ ID NO: 1

SEQ ID NO: 194 - protein, 159 aa, Escherichia coli [sequence omitted]

SEQ ID NO: 195 - protein, 327 aa, Homo sapiens
MEETRELQSLAAAVVPSAQTLKITDFSFSDFELSDLETALCTIRMFTDLNLVQNFQMKHEVLCRWILSVKKNYRKNVAYHNWRHAFNTAQCMFAALKAGKIQNKLTDLEILALLIAALSHDLDHRGVNNSYIQRSEHPLAQLYCHSIMEHHHFDQCLMILNSPGNQILSGLSIEEYKTTLKIIKQAILATDLALYIKRRGEFFELIRKNQFNLEDPHQKELFLAMLMTACDLSAITKPWPIQQRIAELVATEFFDQGDRERKELNIEPTDLMNREKKNKIPSMQVGFIDAICLQLYEALTHVSEDCFPLLDGCRKNRQKWQALAEQQ

SEQ ID NO: 196 - protein, 189 aa, Homo sapiens
SVEAVQEITEYAKSIPGFVNLDLNDQVTLLKYGVHEIIYTMLASLMNKDGVLISEGQGFMTREFLKSLRKPFGDFMEPKFEFAVKFNALELDDSDLAIFIAVIILSGDRPGLLNVKPIEDIQDNLLQALELQLKLNHPESSQLFAKLLQKMTDLRQIVTEHVQLLQVIKKTETDMSLHPLLQEIYKDLY

SEQ ID NO: 197 - protein, 260 aa, Homo sapiens
MSHHWGYGKHNGPEHWHKDFPIAKGERQSPVDIDTHTAKYDPSLKPLSVSYDQATSLRILNNGHAFNVEFDDSQDKAVLKGGPLDGTYRLIQFHFHWGSLDGQGSEHTVDKKKYAAELHLVHWNTKYGDFGKAVQQPDGLAVLGIFLKVGSAKPGLQKVVDVLDSIKTKGKSADFTNFDPRGLLPESLDYWTYPGSLTTPPLLECVTWIVLKEPISVSSEQVLKFRKLNFNGEGEPEELMVDNWRPAQPLKNRQIKASFK

SEQ ID NO: 198 - protein, 231 aa, Homo sapiens
MAGKKVLIVYAHQEPKSFNGSLKNVAVDELSRQGCTVTVSDLYAMNLEPRATDKDITGTLSNPEVFNYGVETHEAYKQRSLASDITDEQKKVREADLVIFQFPLYWFSVPAILKGWMDRVLCQGFAFDIPGFYDSGLLQGKLALLSVTTGGTAEMYTKTGVNGDSRYFLWPLQHGTLHFCGFKVLAPQISFAPEIASEEERKGMVAAWSQRLQTIWKEEPIPCTAHWHFGQ

SEQ ID NO: 199 - protein, 449 aa, synthetic construct
  REGION 1..449: note = Description of Artificial Sequence: Synthetic heavy chain variable domain
EVKLQESGPGLVAPSQSLSVTCTVSGVSLPDYGVSWIRQPPRKGLEWLGVIWGSETTYYNSALKSRLTIIKDNSKSQVFLKMNSLQTDDTAIYYCAKHYYYGGSYAMDYWGQGTSVTVSSASTKGPSVFPLAPSSKSTSGGTAALGCLVKDYFPEPVTVSWNSGALTSGVHTFPAVLQSSGLYSLSSVVTVPSSSLGTQTYICNVNHKPSNTKVDKKVEPKSCDKTHTCPPCPAPPVAGPSVFLFPPKPKDTLMISRTPEVTCVVVDVSHEDPEVKFNWYVDGVEVHNAKTKPREEQYNSTYRVVSVLTVLHQDWLNGKEYKCKVSNKGLPSSIEKTISKAKGQPREPQVYTLPPSRDELTKNQVSLTCLVKGFYPSDIAVEWESNGQPENNYKTTPPVLDSDGSFFLYSKLTVDKSRWQQGNVFSCSVMHEALHNHYTQKSLSLSPGK

SEQ ID NO: 200 - protein, 223 aa, synthetic construct
  REGION 1..223: note = Description of Artificial Sequence: Synthetic heavy chain variable domain
EVKLQESGPGLVAPSQSLSVTCTVSGVSLPDYGVSWIRQPPRKGLEWLGVIWGSETTYYNSALKSRLTIIKDNSKSQVFLKMNSLQTDDTAIYYCAKHYYYGGSYAMDYWGQGTSVTVSSASTKGPSVFPLAPSSKSTSGGTAALGCLVKDYFPEPVTVSWNSGALTSGVHTFPAVLQSSGLYSLSSVVTVPSSSLGTQTYICNVNHKPSNTKVDKKVEPKSC

SEQ ID NO: 201 - protein, 234 aa, synthetic construct
  REGION 1..234: note = Description of Artificial Sequence: Synthetic heavy chain variable domain
EVKLQESGPGLVAPSQSLSVTCTVSGVSLPDYGVSWIRQPPRKGLEWLGVIWGSETTYYNSALKSRLTIIKDNSKSQVFLKMNSLQTDDTAIYYCAKHYYYGGSYAMDYWGQGTSVTVSSASTKGPSVFPLAPSSNYHLENEVARLKKLSGGTAALGCLVKDYFPEPVTVSWNSGALTSGVHTFPAVLQSSGLYSLSSVVTVPSSSLGTQTYICNVNHKPSNTKVDKKVEPKSC

SEQ ID NO: 202 - protein, 460 aa, synthetic construct
  REGION 1..460: note = Description of Artificial Sequence: Synthetic heavy chain variable domain
EVKLQESGPGLVAPSQSLSVTCTVSGVSLPDYGVSWIRQPPRKGLEWLGVIWGSETTYYNSALKSRLTIIKDNSKSQVFLKMNSLQTDDTAIYYCAKHYYYGGSYAMDYWGQGTSVTVSSASTKGPSVFPLAPSSNYHLENEVARLKKLSGGTAALGCLVKDYFPEPVTVSWNSGALTSGVHTFPAVLQSSGLYSLSSVVTVPSSSLGTQTYICNVNHKPSNTKVDKKVEPKSCDKTHTCPPCPAPPVAGPSVFLFPPKPKDTLMISRTPEVTCVVVDVSHEDPEVKFNWYVDGVEVHNAKTKPREEQYNSTYRVVSVLTVLHQDWLNGKEYKCKVSNKGLPSSIEKTISKAKGQPREPQVYTLPPSRDELTKNQVSLTCLVKGFYPSDIAVEWESNGQPENNYKTTPPVLDSDGSFFLYSKLTVDKSRWQQGNVFSCSVMHEALHNHYTQKSLSLSPGK

SEQ ID NO: 203 - protein, 241 aa, synthetic construct
  REGION 1..241: note = Description of Artificial Sequence: Synthetic heavy chain variable domain
EVKLQESGPGLVAPSQSLSVTCTVSGVSLPDYGVSWIRQPPRKGLEWLGVIWGSETTYYNSALKRLTIIKDNSKSQVFLKMNSLQTDDTAIYYCAKHYYYGGSYAMDYWGQGTSVTVSSASTKGPSVFPLAPSSKSTSGGTAALGCLVKDYFPEPVTVSWNSGALTSGVHTFPAVLQSSGLYSLSSVVTVPSSSLGTQTYICNVNHKPSNTKVDKKVEPKSCGGGGSNYHLENEVARLKKL

SEQ ID NO: 204 - protein, 471 aa, synthetic construct
  REGION 1..471: note = Description of Artificial Sequence: Synthetic heavy chain variable domain
EVKLQESGPGLVAPSQSLSVTCTVSGVSLPDYGVSWIRQPPRKGLEWLGVIWGSETTYYNSALKSRLTIIKDNSKSQVFLKMNSLQTDDTAIYYCAKHYYYGGSYAMDYWGQGTSVTVSSASTKGPSVFPLAPSSKSTSGGTAALGCLVKDYFPEPVTVSWNSGALTSGVHTFPAVLQSSGLYSLSSVVTVPSSSLGTQTYICNVNHKPSNTKVDKKVEPKSCGGGGSNYHLENEVARLKKLGGSDKTHTCPPCPAPPVAGPSVFLFPPKPKDTLMISRTPEVTCVVVDVSHEDPEVKFNWYVDGVEVHNAKTKPREEQYNSTYRVVSVLTVLHQDWLNGKEYKCKVSNKGLPSSIEKTISKAKGQPREPQVYTLPPSRDELTKNQVSLTCLVKGFYPSDIAVEWESNGQPENNYKTTPPVLDSDGSFFLYSKLTVDKSRWQQGNVFSCSVMHEALHNHYTQKSLSLSPGK

SEQ ID NO: 205 - protein, 120 aa, synthetic construct
  REGION 1..120: note = Description of Artificial Sequence: Synthetic heavy chain variable domain
EVKLQESGPGLVAPSQSLSVTCTVSGVSLPDYGVSWIRQPPRKGLEWLGVIWGSETTYYNSALKSRLTIIKDNSKSQVFLKMNSLQTDDTAIYYCAKHYYYGGSYAMDYWGQGTSVTVSS

SEQ ID NO: 206 - protein, 111 aa, synthetic construct
  REGION 1..111: note = Description of Artificial Sequence: Synthetic heavy chain variable domain
DIQLTQSPASLAVSLGQRATISCKASQSVDYDGDSYLNWYQQIPGQPPKLLIYDASNLVSGIPPRFSGSGSGTDFTLNIHPVEKVDAATYHCQQSTEDPWTFGGGTKLEIK

SEQ ID NO: 207 - protein, 464 aa, synthetic construct
  REGION 1..464: note = Description of Artificial Sequence: Synthetic heavy chain variable domain
MEWSWIFLFLLSGTAGVHSEVQLQQSGPELIKPGASVKMSCKASGYTFTSYVMHWVKQKPGQGLEWIGYINPYNDGTKYNEKFKGKATLTSDKSSSTAYMELSSLTSEDSAVYYCARGTYYYGSRVFDYWGQGTTLTVSSAKTTPPSVYPLAPGSAAQTNSMVTLGCLVKGYFPEPVTVTWNSGSLSSGVHTFPAVLQSDLYTLSSSVTVPSSTWPSETVTCNVAHPASSTKVDKKIVPRDCGCKPCICTVPEVSSVFIFPPKPKDVLTITLTPKVTCVVVDISKDDPEVQFSWFVDDVEVHTAQTQPREEQFNSTFRSVSELPIMHQDWLNGKEFKCRVNSAAFPAPIEKTISKTKGRPKAPQVYTIPPPKEQMAKDKVSLTCMITDFFPEDITVEWQWNGQPAENYKNTQPIMDTDGSYFVYSKLNVQKSNWEAGNTFTCSVLHEGLHNHHTEKSLSHSPGK

SEQ ID NO: 208 - protein, 137 aa, synthetic construct
  REGION 1..137: note = Description of Artificial Sequence: Synthetic heavy chain variable domain
DIVMTQAAPSIPVTPGESVSISCRSSKSLLNSNGNTYLYWFLQRPGQSPQLLIYRMSNLASGVPDRFSGSGSGTAFTLRISRVEAEDVGVYYCMQHLEYPFTFGAGTKLELKRSDPLINKERGGGGSGGGGSGGGGS

SEQ ID NO: 209 - protein, 124 aa, synthetic construct
  REGION 1..124: note = Description of Artificial Sequence: Synthetic heavy chain variable domain
QVQLQQSGAEVKKPGSSVKVSCKASGYAFSSYWMNWVRQRPGQGLEWIGQIWPGDGDTNYNGKFKGRATITADESTNTAYMELSSLRSEDTAFYSCARRETTTVGRYYYAMDYWGQGTTVTVSS

SEQ ID NO: 210 - protein, 130 aa, synthetic construct
  REGION 1..130: note = Description of Artificial Sequence: Synthetic heavy chain variable domain
QITLKESGPTLVKPTQTLTLTCTFSGFSLSTSGVGVGWIRQPPGKALEWLALIYWDDDKRYSPSLKSRLTITKDTSKNQVVLTMTNMDPVDTATYYCAHIDYGSGSYSPRTSYYYYMSVWGKGTTVTVSS

SEQ ID NO: 211 - protein, 125 aa, synthetic construct
  REGION 1..125: note = Description of Artificial Sequence: Synthetic heavy chain variable domain
QVQLVQSGGGVVQPGRSLRLSCAASGFTFDDYAMHWVRQAPGKGLEWVSGISWNSGSIGYADSVKGRFTISRDNAKNSLYLQMNSLRAEDTAVYYCARDQGYHYYDSAEHAFDIWGQGTVVTVSS

SEQ ID NO: 212 - protein, 125 aa, synthetic construct
  REGION 1..125: note = Description of Artificial Sequence: Synthetic heavy chain variable domain
EVQLVQSGGGLVQPGRSLRLSCAASGFTFDDYAMHWVRQAPGKGLEWVSGISWNSGSIGYADSVKGRFTISRDNAKNSLYLQMNSLRAEDTAVYYCARDQGYHYYDSAEHAFDIWGQGTVVTVSS

SEQ ID NO: 213 - protein, 228 aa, synthetic construct
  REGION 1..228: note = Description of Artificial Sequence: Synthetic heavy chain variable domain
EVKLQESGPGLVAPSQSLSVTCTVSGVSLPDYGVSWIRQPPRKGLEWLGVIWGSETTYYNSALKSRLTIIKDNSKSQVFLKMNSLQTDDTAIYYCAKHYYYGGSYAMDYWGQGTSVTVSSASTKGPSVFPLAPSSKSTSGGTAALGCLVKDYFPEPVTVSWNSGALTSGVHTFPAVLQSSGLYSLSSVVTVPSSSLGTQTYICNVNHKPSNTKVDKKVEPKSCDKTHT

SEQ ID NO: 214 - protein, 98 aa, synthetic construct
  REGION 1..98: note = Description of Artificial Sequence: Synthetic heavy chain variable domain
  MOD_RES 64..65: note = Any amino acid
  MOD_RES 68..69: note = Any amino acid
  MOD_RES 93: note = Any amino acid
  MOD_RES 98: note = Any amino acid
QVQLVESGGGLVQPGRSLRLSCAASGFTFDDYAMHWVRQAPGKGLEWVSGISWNSGRIGYADSXXGRXXISRDNAKNSLFLQMNSLRAEDTAXYYCAX

SEQ ID NO: 215 - protein, 125 aa, synthetic construct
  REGION 1..125: note = Description of Artificial Sequence: Synthetic heavy chain variable domain
  MOD_RES 76: note = Any amino acid
QVQLVESGGGLVQPGRSLRLSCAASGFTFDDYAMHWVRQAPGKGLEWVSGISWNSGRIGYADSVKGRFTISRDNAXNSLFLQMNSLRAEDTAVYYCARDQGYHYYDSAEHAFDIWGQGTVVTVSS

SEQ ID NO: 216 - protein, 125 aa, synthetic construct
  REGION 1..125: note = Description of Artificial Sequence: Synthetic heavy chain variable domain
QVQLVESGGGLVQPGRSLRLSCAASGFTFDDYAMHWVRQAPGKGLEWVSGISWNSGRIGYADSVKGRFTISRDNAKNSLFLQMNSLRAEDTAVYYCARDQGYHYYDSAEHAFDIWGQGTVVTVSS

SEQ ID NO: 217 - protein, 125 aa, synthetic construct
  REGION 1..125: note = Description of Artificial Sequence: Synthetic heavy chain variable domain
EVQLVESGGGLVQPGRSLRLSCAASGFTFDDYAMHWVRQAPGKGLEWVSGISWNSGRIGYADSVKGRFTISRDNAKNSLFLQMNSLRAEDTAVYYCARDQGYHYYDSAEHAFDIWGQGTMVTVSS

SEQ ID NO: 218 - protein, 125 aa, synthetic construct
  REGION 1..125: note = Description of Artificial Sequence: Synthetic heavy chain variable domain
QVQLVESGGGLVQPGRSLRLSCAASGFTFDDYAMHWVRQAPGKGLEWVSGISWNSGRIGYADSVKGRFTISRDNAKNSLFLQMNSLRAEDTAVYYCARDQGYHYYDSAEHAFDIWGQGTMVTVSS

SEQ ID NO: 219 - protein, 125 aa, synthetic construct
  REGION 1..125: note = Description of Artificial Sequence: Synthetic heavy chain variable domain
EVQLVESGGGLVQPGRSLRLSCAASGFTFDDYAMHWVRQAPGKGLEWVSGISWNSGRIGYADSVKGRFTISRDNAKNSLFLQMNSLRAEDTAVYYCARDQGYHYYDSAEHAFDIWGQGTVVTVSS

SEQ ID NO: 220 - protein, 125 aa, synthetic construct
  REGION 1..125: note = Description of Artificial Sequence: Synthetic heavy chain variable domain
EVQLVESGGGLVQPGRSLRLSCAASGFTFDDYAMHWVRLAPGKGLEWVSGISWNSGRIGYADSVKGRFTISRDNAKNSLFLQMNSLRAKDTAVYYCARDQGYHYYDSAEHAFDIWGQGTMVTVSS

SEQ ID NO: 221 - protein, 125 aa, synthetic construct
  REGION 1..125: note = Description of Artificial Sequence: Synthetic heavy chain variable domain
QMQLVQSGGGLVQPGRSLRLSCAASGFTFDDYAMHWVRQAPGKGLEWVSGISWNSGSIGYADSVKGRFTISRDNAKNSLYLQMNSLRAEDTAVYYCARDQGYHYYDSAEHAFDIWGQGTVVTVSS

SEQ ID NO: 222 - protein, 464 aa, synthetic construct; identical to SEQ ID NO: 207
  REGION 1..464: note = Description of Artificial Sequence: Synthetic heavy chain variable domain

SEQ ID NO: 223 - protein, 120 aa, synthetic construct; identical to SEQ ID NO: 205
  REGION 1..120: note = Description of Artificial Sequence: Synthetic heavy chain variable domain

SEQ ID NO: 224 - protein, 218 aa, synthetic construct
  REGION 1..218: note = Description of Artificial Sequence: Synthetic heavy chain variable domain
EVQLVESGGGLVQPGGSLRLSCAASGVSLPDYGVSWVRQSPGKGLEWVAVIWGSETTYYADSVKGRFTISADTSKNTYLQMNSLRAEDTAWYCSRHYYYGGSYAMDYWGQGTLVTVSSASTKGPSVFPLAPSSKSTSGGTAALGCLVKDYFPEPVTVSWNSGALTSGVHTFPAVLQSSGLYSLSSVVTVPSSSLGTQTYICNVNHKPSNTKVDKKVEP

SEQ ID NO: 225 - protein, 219 aa, synthetic construct
  REGION 1..219: note = Description of Artificial Sequence: Synthetic heavy chain variable domain
EVQLVESGGGLVQPGGSLRLSCAASGVSLPDYGVSWVRQSPGKGLEWVAVIWGSETTYYADSVKGRFTISADTSKNTYLQMNSLRAEDTAIYYCSRHYYYGGSYAMDYWGQGTLVTVSSASTKGPSVFPLAPSSKSTSGGTAALGCLVKDYFPEPVTVSWNSGALTSGVHTFPAVLQSSGLYSLSSVVTVPSSSLGTQTYICNVNHKPSNTKVDKKVEP

SEQ ID NO: 226 - protein, 460 aa, synthetic construct; identical to SEQ ID NO: 202
  REGION 1..460: note = Description of Artificial Sequence: Synthetic heavy chain variable domain

SEQ ID NO: 227 - protein, 242 aa, synthetic construct
  REGION 1..242: note = Description of Artificial Sequence: Synthetic heavy chain variable domain
EVKLQESGPGLVAPSQSLSVTCTVSGVSLPDYGVSWIRQPPRKGLEWLGVIWGSETTYYNSALKSRLTIIKDNSKSQVFLKMNSLQTDDTAIYYCAKHYYYGGSYAMDYWGQGTSVTVSSASTKGPSVFPLAPSSKSTSGGTAALGCLVKDYFPEPVTVSWNSGALTSGVHTFPAVLQSSGLYSLSSVVTVPSSSLGTQTYICNVNHKPSNTKVDKKVEPKSCGGGGSNYHLENEVARLKKL

SEQ ID NO: 228 - protein, 471 aa, synthetic construct; identical to SEQ ID NO: 204
  REGION 1..471: note = Description of Artificial Sequence: Synthetic heavy chain variable domain

SEQ ID NO: 229 - protein, 118 aa, synthetic construct
  REGION 1..118: note = Description of Artificial Sequence: Synthetic heavy chain variable domain
EVKLQESGPGLVAPSQSLSVTCTVSGVSLPDYGVSWIRQPPRKGLEWLGVIWGSETTYYNSALKSRLTIIKDNSKSQVFLKMNSLQTDDTAIYYCAKHYYYGGSYAMDYWGQGTSVTV

SEQ ID NO: 230 - protein, 119 aa, synthetic construct
  REGION 1..119: note = Description of Artificial Sequence: Synthetic heavy chain variable domain
EVQLQQSGPELIKPGASVKMSCKASGYTFTSYVMHWVKQKPGQGLEWIGYINPYNDGTKYNEKFKGKATLTSDKSSSTAYMELSSLTSEDSAVYYCARGTYYYGSRVFDYWGQGTTLTV

SEQ ID NO: 231 - protein, 112 aa, synthetic construct
  REGION 1..112: note = Description of Artificial Sequence: Synthetic light chain variable domain
DIQLTQSPSSLSASVGDRVTITCKASQSVDYDGDSYLNWYQQIPGKAPKLLIYDASNLVSGIPPRFSGSGSGTDYTFTISSLQPEDIATYHCQQSTEDPWTFGGGTKLQIKR

SEQ ID NO: 232 - protein, 447 aa, synthetic construct
  REGION 1..447: note = Description of Artificial Sequence: Synthetic light chain variable domain
QVQLVQSGAEVKKPGASVKVSCKASGYTFTSYWMYWVRQATGQGLEWMGRIDPNSGSTKYNEKFKNRFTISRDDSKNTAYLQMNSLKTEDTAVYYCARDYRKGLYAMDYWGQGTTVTVSSASTKGPSVFPLAPCSRSTSESTAALGCLVKDYFPEPVTVSWNSGALTSGVHTFPAVLQSSGLYSLSSVVTVPSSSLGTKTYTCNVDHKPSNTKVDKRVESKYGPPCPPCPAPEFLGGPSVFLFPPKPKDTLMISRTPEVTCVVVDVSQEDPEVQFNWYVDGVEVHNAKTKPREEQFNSTYRVVSVLTVLHQDWLNGKEYKCKVSNKGLPSSIEKTISKAKGQPREPQVYTLPPSQEEMTKNQVSLTCLVKGFYPSDIAVEWESNGQPENNYKTTPPVLDSDGSFFLYSRLTVDKSRWQEGNVFSCSVMHEALHNHYTQKSLSLSLGK

SEQ ID NO: 233 - protein, 111 aa, synthetic construct
  REGION 1..111: note = Description of Artificial Sequence: Synthetic light chain variable domain
QAVLTQPSSVSGAPGQRVTISCTGSSSNIGAGYDVHWYQQLPGTAPKLLIYGNSNRPSGVPDRFSGSKSGTSASLAVTGLQAEDEADYYCQSYDSSLSDVVFGGGTKLTVL

SEQ ID NO: 234 - protein, 107 aa, synthetic construct
  REGION 1..107: note = Description of Artificial Sequence: Synthetic light chain variable domain
EIVMTQSPSSLPASVGDRVTITCRASQNIKTYLHWYQQKPGKAPNLLIYAASNLQIGVPSRFSGSGSGTDFTLTISSLQPEDFATYFCQQSYITPPTFGQGTRLEIK

SEQ ID NO: 235 - protein, 214 aa, synthetic construct
  REGION 1..214: note = Description of Artificial Sequence: Synthetic light chain variable domain
DIQMTQTTSSLSASLGDRVTISCRASQDISKYLNWYQQKPDGTVKLLIYHTSRLHSGVPSRFSGSGSGTDYSLTISNLEQEDIATYFCQQGNTLPYTFGGGTKLEIKRTVAAPSVFIFPPSDEQLKSGTASVVCLLNNFYPREAKVQWKVDNALQSGNSQESVTEQDSKDSTYSLSSTLTLSKADYEKHKVYACEVTHQGLSSPVTKSFNRGEC

SEQ ID NO: 236 - protein, 237 aa, synthetic construct
  REGION 1..237: note = Description of Artificial Sequence: Synthetic light chain variable domain
DIQMTQTTSSLSASLGDRVTISCRASQDISKYLNWYQQKPDGTVKLLIYHTSRLHSGVPSRFSGSGSGTDYSLTISNLEQEDIATYFCQQGNTLPYTFGGGTKLEIKRTVAAPSVFIFPPSDEQLKSGTASVVCLLNNFYPREAKVQWKVDNALQSGNSQESVTEQDSGGGGSNYHLENEVARLKKLGGGGSDSTYSLSSTLTLSKADYEKHKVYACEVTHQGLSSPVTKSFNRGEC

SEQ ID NO: 237 - protein, 107 aa, synthetic construct
  REGION 1..107: note = Description of Artificial Sequence: Synthetic light chain variable domain
DIQMTQTTSSLSASLGDRVTISCRASQDISKYLNWYQQKPDGTVKLLIYHTSRLHSGVPSRFSGSGSGTDYSLTISNLEQEDIATYFCQQGNTLPYTFGGGTKLEIT

SEQ ID NO: 238 - protein, 107 aa, synthetic construct; identical to SEQ ID NO: 237
  REGION 1..107: note = Description of Artificial Sequence: Synthetic light chain variable domain

SEQ ID NO: 239 - protein, 115 aa, synthetic construct
  REGION 1..115: note = Description of Artificial Sequence: Synthetic light chain variable domain
DIVMTQAAPSIPVTPGESVSISCRSSKSLLNSNGNTYLYWFLQRPGQSPQLLIYRMSNLASGVPDRFSGSGSGTAFTLRISRVEAEDVGVYYCMQHLEYPFTFGAGTKLELKRAD

SEQ ID NO: 240 - protein, 107 aa, synthetic construct; identical to SEQ ID NO: 237
  REGION 1..107: note = Description of Artificial Sequence: Synthetic light chain variable domain

SEQ ID NO: 241 - protein, 112 aa, synthetic construct
  REGION 1..112: note = Description of Artificial Sequence: Synthetic light chain variable domain
DIVMTQAAPSIPVTPGESVSISCRSSKSLLNSNGNTYLYWFLQRPGQSPQLLIYRMSNLASGVPDRFSGSGSGTAFTLRISRVEAEDVGVYYCMQHLEYPFTFGAGTKLELK

SEQ ID NO: 242 - protein, 106 aa, synthetic construct
  REGION 1..106: note = Description of Artificial Sequence: Synthetic light chain variable domain
QSALTQPRSVSGFPGQSVTISCTGTTSDDVSWYQQHPGKAPQLMLYDVSKRPSGVPHRFSGSRSGRAASLIISGLQTEDEADYFCCSYAGRYNSVLFGGGTKLTVL

SEQ ID NO: 243 - protein, 106 aa, synthetic construct
  REGION 1..106: note = Description of Artificial Sequence: Synthetic light chain variable domain
QSALTQPRSVSGFPGQSVTISCTGTTSDDVSWYQQHPGKAPQLMLYDVSKRPSGVPHRFSGSRSGRAASLIISGLQTEDEADYFCSSYAGRYNSVLFGGGTKLTVL

SEQ ID NO: 244 - protein, 110 aa, synthetic construct
  REGION 1..110: note = Description of Artificial Sequence: Synthetic light chain variable domain
QSALTQPASVSGSPGQSITIFCTGTSSDVGGYNYVSWYQQLPGTAPKLLIYSNNQRPSGVPDRFSGSKSGTSASLAISGLRSEDEADYYCAAWDDSLSVVFGGGTKLTVL

SEQ ID NO: 245 - protein, 109 aa, synthetic construct
  REGION 1..109: note = Description of Artificial Sequence: Synthetic light chain variable domain
QSVLTQPPSVSAAPGQEVTISCSGSSSNIGNNYVSWYQQLPGTAPKLLIYDNDKRPSGIPDRFSGSKSGTSATLGITGLQTGDEADYYCGTWDGNLSAVFGGGTKVTVL

SEQ ID NO: 246 - protein, 108 aa, synthetic construct
  REGION 1..108: note = Description of Artificial Sequence: Synthetic light chain variable domain
SYELTQDPAVSVALGQTVRITCQGDSLRSYYASWYQQKPGQAPVLVIYDKNNRPSGIPDRFSGSSSGNTASLTITGAQAEDEADYYCNSRDSSGNNWVFGGGTKLTVL

SEQ ID NO: 247 - protein, 107 aa, synthetic construct
  REGION 1..107: note = Description of Artificial Sequence: Synthetic light chain variable domain
AIQLTQSPSFLSASVGDRVTITCRASQGISSYLNWYQQRAGKAPELLIYAASNLQSGVPSRFSGSGSGTDFTLTITSVQPEDFATYFCQQGDAFPLTFGPGTKVTIR

SEQ ID NO: 248 - protein, 109 aa, synthetic construct
  REGION 1..109: note = Description of Artificial Sequence: Synthetic light chain variable domain
EIVLTQSPATLSLSPGETATLSCRASQSINHYLAWYQQKPGQAPRLLIYDASNRATGIPARFSGSGSGTDFTLTISSLEPEDFATYYCQQSYSHPRMYTFGQGTKLEIK

SEQ ID NO: 249 - protein, 109 aa, synthetic construct
  REGION 1..109: note = Description of Artificial Sequence: Synthetic light chain variable domain
AIRMTQSPSSLSASVGDRVTVTCQASQDISNYLNWYQQKPGRAPKLLIYDASNVKAGVPSRFSGGGSGTDFTLTISSLQPEDFATYYCQQSYSTPQAYTFGQGTKLDIK

SEQ ID NO: 250 - protein, 111 aa, synthetic construct
  REGION 1..111: note = Description of Artificial Sequence: Synthetic light chain variable domain
QSVLTQPPSVSAAPGQKVTISCSGSSSNIGNNYVSWYQQLPGTAPKLLIYDNNKRPSGIPDRFSGSKSGTSATLGITGLQTGDEADYYCGTWDSSLNRDWVFGGGTKLTVL

SEQ ID NO: 251 - protein, 109 aa, synthetic construct
  REGION 1..109: note = Description of Artificial Sequence: Synthetic light chain variable domain
  MOD_RES 5..6: note = Any amino acid
  MOD_RES 8..9: note = Any amino acid
  MOD_RES 93: note = Any amino acid
  MOD_RES 104: note = Any amino acid
QSVLXXPXXASGSPGQSVTVSCTGTGRDIGAYDYVSWYQQHPGKAPKLLIYGVNKRPSGVPDRFSGSKSDNTASLTVSGLQVEDEADYYCSSXAGRKYVFGTGXKVTVL

SEQ ID NO: 252 - protein, 112 aa, synthetic construct
  REGION 1..112: note = Description of Artificial Sequence: Synthetic light chain variable domain
  MOD_RES 61: note = Any amino acid
QSALTQPASVSGSPGQSITISCTETSSDLGGYNYVSWYQHRPGKAPKLIIYDVTVRPSGVXDRFSGSKSGNTASLTISGLQAEDEADYYCGSYTSSSTLLWVFGGGTKLTVL

SEQ ID NO: 253 - protein, 112 aa, synthetic construct
  REGION 1..112: note = Description of Artificial Sequence: Synthetic light chain variable domain
QSALTQPASVSGSPGQSITISCTGTSSDLGGYNYVSWYQHRPGKAPKLIIYDVTVRPSGVSDRFSGSKSGNTASLTISGLQAEDEADYYCGSYTSSSTLLWVFGGGTKLTVL

SEQ ID NO: 254 - protein, 110 aa, synthetic construct
  REGION 1..110: note = Description of Artificial Sequence: Synthetic light chain variable domain
QSALTQPASVSGSPGHSITISCTGTRSDVGGFDYVSWYQHNPGKAPKLIIYDVTKRPSGVSNRFSGAKSGITASLTISGLQAEDEADYYCTSYRPGPTFVFGTGTKLDIK

SEQ ID NO: 255 - protein, 112 aa, synthetic construct
  REGION 1..112: note = Description of Artificial Sequence: Synthetic light chain variable domain
QSALTQPASVSGSPGQSITISCTGTSSDLGGYNYVSWYQHRPGKAPKLIIYDVTVRPSGVSDRFSGSKSGNTASLTISGLQAEDEADYYCGSYTSSSTLLWVFGGGTKLDIK

SEQ ID NO: 256 - protein, 111 aa, synthetic construct
  REGION 1..111: note = Description of Artificial Sequence: Synthetic light chain variable domain
QSVLTQPRSLSGSPGQSVTIACTGASTDVGGYNYVSWYQQHPGKAPKLMIYDVNKRPSGVPDRFSGSKSGNTAFLTISGLQAEDEADYYCCSYAGSYTFEVFGGGTKLTVL

SEQ ID NO: 257 - protein, 111 aa, synthetic construct
  REGION 1..111: note = Description of Artificial Sequence: Synthetic light chain variable domain
QLVLTQPPSVSGSPGQSVTFSCTGASSDVGGYDHVSWYQHHPGKGPKLLIYDVSKRPSGVPDRFSGSKSGNTASLTISGLQAEDEADYYCCSFAGYYTYWLFGGGTKVTVL

SEQ ID NO: 258 - protein, 106 aa, synthetic construct
  REGION 1..106: note = Description of Artificial Sequence: Synthetic light chain variable domain
QSALTQPRSVSGFPGQSVTISCTGTTSDDVSWYQQHPGKAPQLMLYDVSKRPSGVPHRFSGSRSGRAASLIISGLQTEDEADYFCCSYAGRYNSVPFGGGTKLTVL

SEQ ID NO: 259 - protein, 99 aa, synthetic construct
  REGION 1..99: note = Description of Artificial Sequence: Synthetic light chain variable domain
SYVLTQPPSASGTPGQRVTISCSGSSSNIGSNTVNWYQQFPGTAPKLLIYSNNQRPSGVPDRFSGSKSGTSASLAISGLQSEDEAEYYCAAWDDSLNVV

SEQ ID NO: 260 - protein, 110 aa, synthetic construct
  REGION 1..110: note = Description of Artificial Sequence: Synthetic light chain variable domain
QSVLTQPPSVSAAPGQKVTISCSGSSSNIGNNYVSWYQQLPGTAPKLLIYDNNKRPSGIPDRFSGSKSGTSATLGITGLQTGDEGDYYCGTWDISLRFGVFGGGTKVTVL

SEQ ID NO: 261 - protein, 111 aa, synthetic construct
  REGION 1..111: note = Description of Artificial Sequence: Synthetic light chain variable domain
QSVLTQPRSVSGSPGQSVTISCTGPISGVGDYTSVSWYQHYPGKTPKLIIYDVTQRPSGVPNRFSGSKSGNTASLTISGLQADDEADYYCCSYEAPTHTYVFGTGTKLTVL

SEQ ID NO: 262 - protein, 124 aa, synthetic construct
  REGION 1..124: note = Description of Artificial Sequence: Synthetic light chain variable domain
QVQLQQSGAELVRPGSSVKISCKASGYAFSSYWMNWVKQRPGQGLEWIGQIWPGDGDTNYNGKFKGKATLTADESSSTAYMQLSSLASEDSAVYFCARRETTTVGRYYYAMDYWGQGTTVTVSS

SEQ ID NO: 263 - protein, 239 aa, synthetic construct
  REGION 1..239: note = Description of Artificial Sequence: Synthetic light chain variable domain
MRCLAEFLGLLVLWIPGAIGDIVMTQAAPSIPVTPGESVSISCRSSKSLLNSNGNTYLYWFLQRPGQSPQLLIYRMSNLASGVPDRFSGSGSGTAFTLRISRVEAEDVGVYYCMQHLEYPFTFGAGTKLELKRADAAPTVSIFPPSSEQLTSGGASVVCFLNNFYPKDINVKWKIDGSERQNGVLNSWTDQDSKDSTYSMSSTLTLTKDEYERHNSYTCEATHKTSTSPIVKSFNRNEC

SEQ ID NO: 264 - protein, 111 aa, synthetic construct
  REGION 1..111: note = Description of Artificial Sequence: Synthetic light chain variable domain
QAVLTQPRSVSGSPGQSVTISCTGISSGVDSHRYVSWYQHHPGKAPKLMIYDFSKRPSGVPDRFSGSKSGNTASLTISGLQAEDEADYYCSSYAAISPNYVFGTGTKLTVL

SEQ ID NO: 265 - protein, 110 aa, synthetic construct
  REGION 1..110: note = Description of Artificial Sequence: Synthetic light chain variable domain
QSALTQPASVSGSPGHSITISCTGTRSDVGGFDYVSWYQHNPGKAPKLIIYDVTKRPSGVSNRFSGAKSGITASLTISGLQAEDEADYYCTSYRPGPTFVFGTGTKLTVL

SEQ ID NO: 266 - protein, 111 aa, synthetic construct
  REGION 1..111: note = Description of Artificial Sequence: Synthetic light chain variable domain
QSALTQPASVSGSPGQSITISCTGTSSDVGAYNFVSWYQQLPGTAPKFLIYDNNKRPPGIPDRFSGSKSGTSATLGITGLQTGDEADYYCATWDSGLSAVVFGGGTKLTVL

SEQ ID NO: 267 - protein, 109 aa, synthetic construct
  REGION 1..109: note = Description of Artificial Sequence: Synthetic light chain variable domain
AIRMTQSPSSLSASVGDRVTVTCQASQDISNYLNWYQQKPGRAPKLLIYDASNVKAGVPSRFSGGGSGTDFTLTISSLQPEDFATYYCQQSYSTPQAYTFGQGTKLEIK

SEQ ID NO: 268 - protein, 108 aa, synthetic construct
  REGION 1..108: note = Description of Artificial Sequence: Synthetic light chain variable domain
AIRMTQSPSTLSASVGDRVTITCRASQSISHYLAWYQQKPGKAPKLLIFDASRLASGVPSRFSGSGSGTDFTLTISSLQPEDFATYYCQQSYGAPMFTFGPGTRVDLK

SEQ ID NO: 269 - protein, 107 aa, synthetic construct
  REGION 1..107: note = Description of Artificial Sequence: Synthetic light chain variable domain
DIQLTQSPSTLSASVGDRVTITCRASQSISRWLAWYQQKPGKAPKLLIYDASNLETGVPSRFSGSGSGTDFTFTISSLQPEDIATYYCQQYDNLPLTFGGGTKVEIK

SEQ ID NO: 270 - protein, 109 aa, synthetic construct
  REGION 1..109: note = Description of Artificial Sequence: Synthetic light chain variable domain
EIVLTQSPATLSLSPGETATLSCRASQSINHYLAWYQQKPGQAPRLLIYDASNRATGIPARFSGSGSGTDFTLTISSLEPEDFATYYCQQSYSHPRMYTFGQGTKLDIK

SEQ ID NO: 271 - protein, 111 aa, synthetic construct
  REGION 1..111: note = Description of Artificial Sequence: Synthetic light chain variable domain
QAVLTQPRSVSGSPGQSVTISCTGISSGVDSHRYVSWYQHHPGKAPKLMIYDFSKRPSGVPDRFSGSKSGNTASLTISGLQAEDEADYYCCSYAAISPNYVFGTGTKLTVL

SEQ ID NO: 272 - protein, 121 aa, synthetic construct
  REGION 1..121: note = Description of Artificial Sequence: Synthetic light chain variable domain
EVQLQQSGPELIKPGASVKMSCKASGYTFTSYVMHWVKQKPGQGLEWIGYINPYNDGTKYNEKFKGKATLTSDKSSSTAYMELSSLTSEDSAVYYCARGTYYYGSRVFDYWGQGTTLTVSS

SEQ ID NO: 273 - protein, 263 aa, synthetic construct
  REGION 1..263: note = Description of Artificial Sequence: Synthetic single chain variable fragment
WSHPQFEKGGGGSGGGGSDIQMTQTTSSLSASLGDRVTISCRASQDISKYLNWYQQKPDGTVKLLIYHTSRLHSGVPSRFSGSGSGTDYSLTISNLEQEDIATYFCQQGNTLPYTFGGGTKLEITGSTSGSGKPGSGEGSTKGEVKLQESGPGLVAPSQSLSVTCTVSGVSLPDYGVSWIRQPPRKGLEWLGVIWGSETTYYNSALKSRLTIIKDNSKSQVFLKMNSLQTDDTAIYYCAKHYYYGGSYAMDYWGQGTSVTVSS

SEQ ID NO: 274 - protein, 247 aa, synthetic construct
  REGION 1..247: note = Description of Artificial Sequence: Synthetic single chain variable fragment
DIQMTQTTSSLSASLGDRVTISCRASQDISKYLNWYQQKPDGTVKLLIYHTSRLHSGVPSRFSGSGSGTDYSLTISNLEQEDIATYFCQQGNTLPYTFGGGTKLEITGGSGSGNWSHPQFEKGSGSGEVKLQESGPGLVAPSQSLSVTCTVSGVSLPDYGVSWIRQPPRKGLEWLGVIWGSETTYYNSALKSRLTIIKDNSKSQVFLKMNSLQTDDTAIYYCAKHYYYGGSYAMDYWGQGTSVTVSS

SEQ ID NO: 275 - protein, 242 aa, synthetic construct
  REGION 1..242: note = Description of Artificial Sequence: Synthetic single chain variable fragment
EIVMTQSPATLSLSPGERATLSCRASQDISKYLNWYQQKPGQAPRLLIYHTSRLHSGIPARFSGSGSGTDYTLTISSLQPEDFAVYFCQQGNTLPYTFGQGTKLEIKGGGGSGGGGSGGGGSQVQLQESGPGLVKPSETLSLTCTVSGVSLPDYGVSWIRQPPGKGLEWIGVIWGSETTYYSSSLKSRVTISKDNSKNQVSLKLSSVTAADTAVYYCAKHYYYGGSYAMDYWGQGTLVTVSS

SEQ ID NO: 276 - protein, 247 aa, synthetic construct
  REGION 1..247: note = Description of Artificial Sequence: Synthetic single chain variable fragment
QVQLQESGPGLVKPSETLSLTCTVSGVSLPDYGVSWIRQPPGKGLEWIGVIWGSETTYYNSSLKSRVTISKDNSKNQVSLKLSSVTAADTAVYYCAKHYYYGGSYAMDYWGQGTLVTVSSGGGGSGGGGSGGGGSGGGGSEIVMTQSPATLSLSPGERATLSCRASQDISKYLNWYQQKPGQAPRLLIYHTSRLHSGIPARFSGSGSGTDYTLTISSLQPEDFAVYFCQQGNTLPYTFGQGTKLEIK

SEQ ID NO: 277 - protein, 248 aa, synthetic construct
  REGION 1..248: note = Description of Artificial Sequence: Synthetic single chain variable fragment
EVQLVESGGGLVQPGRSLRLSCAASGFTFDDYAMHWVRQAPGKGLEWVSGISWNSGRIGYADSVKGRFTISRDNAKNSLFLQMNSLRAEDTAVYYCARDQGYHYYDSAEHAFDIWGQGTMVTVSSGGGGSGGGGSGGGGSSYELTQDPAVSVALGQTVRITCQGDSLRSYYASWYQQKPGQAPVLVIYDKNNRPSGIPDRFSGSSSGNTASLTITGAQAEDEADYYCNSRDSSGNNWVFGGGTKLTVL

SEQ ID NO: 278 - protein, 242 aa, synthetic construct
  REGION 1..242: note = Description of Artificial Sequence: Synthetic single chain variable fragment
EIVMTQSPATLSLSPGERATLSCRASQDISKYLNWYQQKPGQAPRLLIYHTSRLHSGIPARFSGSGSGTDYTLTISSLQPEDFAVYFCQQGNTLPYTFGQGTKLEIKGGGGSGGGGSGGGGSQVQLQESGPGLVKPSETLSLTCTVSGVSLPDYGVSWIRQPPGKGLEWIGVIWGSETTYYNSSLKSRVTISKDNSKNQVSLKLSSVTAADTAVYYCAKHYYYGGSYAMDYWGQGTLVTVSS

SEQ ID NO: 279 - protein, 242 aa, synthetic construct
  REGION 1..242: note = Description of Artificial Sequence: Synthetic single chain variable fragment
QVQLQESGPGLVKPSETLSLTCTVSGVSLPDYGVSWIRQPPGKGLEWIGVIWGSETTYYNSSLKSRVTISKDNSKNQVSLKLSSVTAADTAVYYCAKHYYYGGSYAMDYWGQGTLVTVSSGGGGSGGGGSGGGGSEIVMTQSPATLSLSPGERATLSCRASQDISKYLNWYQQKPGQAPRLLIYHTSRLHSGIPARFSGSGSGTDYTLTISSLQPEDFAVYFCQQGNTLPYTFGQGTKLEIK

SEQ ID NO: 280 - protein, 242 aa, synthetic construct
  REGION 1..242: note = Description of Artificial Sequence: Synthetic single chain variable fragment
EIVMTQSPATLSLSPGERATLSCRASQDISKYLNWYQQKPGQAPRLLIYHTSRLHSGIPARFSGSGSGTDYTLTISSLQPEDFAVYFCQQGNTLPYTFGQGTKLEIKGGGGSGGGGSGGGGSQVQLQESGPGLVKPSETLSLTCTVSGVSLPDYGVSWIRQPPGKGLEWIGVIWGSETTYYQSSLKSRVTISKDNSKNQVSLKLSSVTAADTAVYYCAKHYYYGGSYAMDYWGQGTLVTVSS

SEQ ID NO: 281 - protein, 246 aa, synthetic construct
  REGION 1..246: note = Description of Artificial Sequence: Synthetic single chain variable fragment
EVQLVESGGGLVQPGRSLRLSCAASGFTFDDYAMHWVRQAPGKGLEWVSGISWNSGRIGYADSVKGRFTISRDNAKNSLFLQMNSLRAEDTAVYYCARDQGYHYYDSAEHAFDIWGQGTVVTVSSGGGGSGGGGSGGGGSQSALTQPRSVSGFPGQSVTISCTGTTSDDVSWYQQHPGKAPQLMLYDVSKRPSGVPHRFSGSRSGRAASLIISGLQTEDEADYFCCSYAGRYNSVLFGGGTKLTVL

SEQ ID NO: 282 - protein, 252 aa, synthetic construct
  REGION 1..252: note = Description of Artificial Sequence: Synthetic single chain variable fragment
QITLKESGPTLVKPTQTLTLTCTFSGFSLSTSGVGVGWIRQPPGKALEWLALIYWDDDKRYSPSLKSRLTITKDTSKNQVVLTMTNMDPVDTATYYCAHIDYGSGSYSPRTSYYYYMSVWGKGTTVTVSSGGGGSGGGGSGGGGSAIQLTQSPSFLSASVGDRVTITCRASQGISSYLNWYQQRAGKAPELLIYAASNLQSGVPSRFSGSGSGTDFTLTITSVQPEDFATYFCQQGDAFPLTFGPGTKVTIR

SEQ ID NO: 283 - protein, 249 aa, synthetic construct
  REGION 1..249: note = Description of Artificial Sequence: Synthetic single chain variable fragment
QVQLVQSGGGVVQPGRSLRLSCAASGFTFDDYAMHWVRQAPGKGLEWVSGISWNSGSIGYADSVKGRFTISRDNAKNSLYLQMNSLRAEDTAVYYCARDQGYHYYDSAEHAFDIWGQGTVVTVSSGGGGSGGGGSGGGGSEIVLTQSPATLSLSPGETATLSCRASQSINHYLAWYQQKPGQAPRLLIYDASNRATGIPARFSGSGSGTDFTLTISSLEPEDFATYYCQQSYSHPRMYTFGQGTKLEIK

SEQ ID NO: 284 - protein, 249 aa, synthetic construct
  REGION 1..249: note = Description of Artificial Sequence: Synthetic single chain variable fragment
EVQLVQSGGGLVQPGRSLRLSCAASGFTFDDYAMHWVRQAPGKGLEWVSGISWNSGSIGYADSVKGRFTISRDNAKNSLYLQMNSLRAEDTAVYYCARDQGYHYYDSAEHAFDIWGQGTVVTVSSGGGGSGGGGSGGGGSAIRMTQSPSSLSASVGDRVTVTCQASQDISNYLNWYQQKPGRAPKLLIYDASNVKAGVPSRFSGGGSGTDFTLTISSLQPEDFATYYCQQSYSTPQAYTFGQGTKLDIK

SEQ ID NO: 285 - protein, 251 aa, synthetic construct
  REGION 1..251: note = Description of Artificial Sequence: Synthetic single chain variable fragment
EVQLVESGGGLVQPGRSLRLSCAASGFTFDDYAMHWVRQAPGKGLEWVSGISWNSGRIGYADSVKGRFTISRDNAKNSLFLQMNSLRAEDTAVYYCARDQGYHYYDSAEHAFDIWGQGTVVTVSSGGGGSGGGGSGGGGSQSVLTQPPSVSAAPGQKVTISCSGSSSNIGNNYVSWYQQLPGTAPKLLIYDNNKRPSGIPDRFSGSKSGTSATLGITGLQTGDEADYYCGTWDSSLNRDWVFGGGTKLTVL

SEQ ID NO: 286 - protein, 252 aa, synthetic construct
  REGION 1..252: note = Description of Artificial Sequence: Synthetic single chain variable fragment
QVQLVESGGGLVQPGRSLRLSCAASGFTFDDYAMHWVRQAPGKGLEWVSGISWNSGRIGYADSVKGRFTISRDNAKNSLFLQMNSLRAEDTAVYYCARDQGYHYYDSAEHAFDIWGQGTVVTVSSGGGGSGGGGSGGGGSQSALTQPASVSGSPGQSITISCTGTSSDLGGYNYVSWYQHRPGKAPKLIIYDVTVRPSGVSDRFSGSKSGNTASLTISGLQAEDEADYYCGSYTSSSTLLWVFGGGTKLTVL

SEQ ID NO: 287 - protein, 252 aa, synthetic construct; identical to SEQ ID NO: 286
  REGION 1..252: note = Description of Artificial Sequence: Synthetic single chain variable fragment

SEQ ID NO: 288 - protein, 252 aa, synthetic construct
  REGION 1..252: note = Description of Artificial Sequence: Synthetic single chain variable fragment
EVQLVESGGGLVQPGRSLRLSCAASGFTFDDYAMHWVRQAPGKGLEWVSGISWNSGRIGYADSVKGRFTISRDNAKNSLFLQMNSLRAEDTAVYYCARDQGYHYYDSAEHAFDIWGQGTVVTVSSGGGGSGGGGSGGGGSQSALTQPASVSGSPGQSITISCTGTSSDLGGYNYVSWYQHRPGKAPKLIIYDVTVRPSGVSDRFSGSKSGNTASLTISGLQAEDEADYYCGSYTSSSTLLWVFGGGTKLTVL

SEQ ID NO: 289 - protein, 252 aa, synthetic construct; identical to SEQ ID NO: 288
  REGION 1..252: note = Description of Artificial Sequence: Synthetic single chain variable fragment

SEQ ID NO: 290 - protein, 252 aa, synthetic construct; identical to SEQ ID NO: 288
  REGION 1..252: note = Description of Artificial Sequence: Synthetic single chain variable fragment

SEQ ID NO: 291 - protein, 252 aa, synthetic construct
  REGION 1..252: note = Description of Artificial Sequence: Synthetic single chain variable fragment
  MOD_RES 76: note = Any amino acid
  MOD_RES 201: note = Any amino acid
QVQLVESGGGLVQPGRSLRLSCAASGFTFDDYAMHWVRQAPGKGLEWVSGISWNSGRIGYADSVKGRFTISRDNAXNSLFLQMNSLRAEDTAVYYCARDQGYHYYDSAEHAFDIWGQGTVVTVSSGGGGSGGGGSGGGGSQSALTQPASVSGSPGQSITISCTETSSDLGGYNYVSWYQHRPGKAPKLIIYDVTVRPSGVXDRFSGSKSGNTASLTISGLQAEDEADYYCGSYTSSSTLLWVFGGGTKLTVL

SEQ ID NO: 292 - protein, 252 aa, synthetic construct; identical to SEQ ID NO: 286
  REGION 1..252: note = Description of Artificial Sequence: Synthetic single chain variable fragment

SEQ ID NO: 293 - protein, 250 aa, synthetic construct
  REGION 1..250: note = Description of Artificial Sequence: Synthetic single chain variable fragment
QVQLVESGGGLVQPGRSLRLSCAASGFTFDDYAMHWVRQAPGKGLEWVSGISWNSGRIGYADSVKGRFTISRDNAKNSLFLQMNSLRAEDTAVYYCARDQGYHYYDSAEHAFDIWGQGTVVTVSSGGGGSGGGGSGGGGSQSALTQPASVSGSPGHSITISCTGTRSDVGGFDYVSWYQHNPGKAPKLIIYDVTKRPSGVSNRFSGAKSGITASLTISGLQAEDEADYYCTSYRPGPTFVFGTGTKLDIK

SEQ ID NO: 294 - protein, 252 aa, synthetic construct
  REGION 1..252: note = Description of Artificial Sequence: Synthetic single chain variable fragment
QVQLVESGGGLVQPGRSLRLSCAASGFTFDDYAMHWVRQAPGKGLEWVSGISWNSGRIGYADSVKGRFTISRDNAKNSLFLQMNSLRAEDTAVYYCARDQGYHYYDSAEHAFDIWGQGTVVTVSSGGGGSGGGGSGGGGSQSALTQPASVSGSPGQSITISCTGTSSDLGGYNYVSWYQHRPGKAPKLIIYDVTVRPSGVSDRFSGSKSGNTASLTISGLQAEDEADYYCGSYTSSSTLLWVFGGGTKLDIK

SEQ ID NO: 295 - protein, 236 aa, synthetic construct
  REGION 1..236: note = Description of Artificial Sequence: Synthetic single chain variable fragment
EVQLVESGGGLVQPGRSLRLSCAASGFTFDDYAMHWVRQAPGKGLEWVSGISWNSGRIGYADSVKGRFTISRDNAKNSLFLQMNSLRAEDTAVYYCARDQGYHYYDSAEHAFDIWGQGTMVTVSSQSVLTQPRSLSGSPGQSVTIACTGASTDVGGYNYVSWYQQHPGKAPKLMIYDVNKRPSGVPDRFSGSKSGNTAFLTISGLQAEDEADYYCCSYAGSYTFEVFGGGTKLTVL

SEQ ID NO: 296 - protein, 251 aa, synthetic construct
  REGION 1..251: note = Description of Artificial Sequence: Synthetic single chain variable fragment
EVQLVESGGGLVQPGRSLRLSCAASGFTFDDYAMHWVRQAPGKGLEWVSGISWNSGRIGYADSVKGRFTISRDNAKNSLFLQMNSLRAEDTAVYYCARDQGYHYYDSAEHAFDIWGQGTMVTVSSGGGGSGGGGSGGGGSQLVLTQPPSVSGSPGQSVTFSCTGASSDVGGYDHVSWYQHHPGKGPKLLIYDVSKRPSGVPDRFSGSKSGNTASLTISGLQAEDEADYYCCSFAGYYTYWLFGGGTKVTVL

SEQ ID NO: 297 - protein, 246 aa, synthetic construct
  REGION 1..246: note = Description of Artificial Sequence: Synthetic single chain variable fragment
EVQLVESGGGLVQPGRSLRLSCAASGFTFDDYAMHWVRQAPGKGLEWVSGISWNSGRIGYADSVKGRFTISRDNAKNSLFLQMNSLRAEDTAVYYCARDQGYHYYDSAEHAFDIWGQGTVVTVSSGGGGSGGGGSGGGGSQSALTQPRSVSGFPGQSVTISCTGTTSDDVSWYQQHPGKAPQLMLYDVSKRPSGVPHRFSGSRSGRAASLIISGLQTEDEADYFCCSYAGRYNSVPFGGGTKLTVL

SEQ ID NO: 298 - protein, 239 aa, synthetic construct
  REGION 1..239: note = Description of Artificial Sequence: Synthetic single chain variable fragment
QVQLVESGGGLVQPGRSLRLSCAASGFTFDDYAMHWVRQAPGKGLEWVSGISWNSGRIGYADSVKGRFTISRDNAKNSLFLQMNSLRAEDTAVYYCARDQGYHYYDSAEHAFDIWGQGTMVTVSSGGGGSGGGGSGGGGSSYVLTQPPSASGTPGQRVTISCSGSSSNIGSNTVNWYQQFPGTAPKLLIYSNNQRPSGVPDRFSGSKSGTSASLAISGLQSEDEAEYYCAAWDDSLNVV

SEQ ID NO: 299 - protein, 250 aa, synthetic construct
  REGION 1..250: note = Description of Artificial Sequence: Synthetic single chain variable fragment
EVQLVESGGGLVQPGRSLRLSCAASGFTFDDYAMHWVRQAPGKGLEWVSGISWNSGRIGYADSVKGRFTISRDNAKNSLFLQMNSLRAEDTAVYYCARDQGYHYYDSAEHAFDIWGQGTVVTVSSGGGGSGGGGSGGGGSQSVLTQPPSVSAAPGQKVTISCSGSSSNIGNNYVSWYQQLPGTAPKLLIYDNNKRPSGIPDRFSGSKSGTSATLGITGLQTGDEGDYYCGTWDISLRFGVFGGGTKVTVL

SEQ ID NO: 300 - protein, 251 aa, synthetic construct
  REGION 1..251: note = Description of Artificial Sequence: Synthetic single chain variable fragment
EVQLVESGGGLVQPGRSLRLSCAASGFTFDDYAMHWVRLAPGKGLEWVSGISWNSGRIGYADSVKGRFTISRDNAKNSLFLQMNSLRAKDTAVYYCARDQGYHYYDSAEHAFDIWGQGTMVTVSSGGGGSGGGGSGGGGSQSVLTQPRSVSGSPGQSVTISCTGPISGVGDYTSVSWYQHYPGKTPKLIIYDVTQRPSGVPNRFSGSKSGNTASLTISGLQADDEADYYCCSYEAPTHTYVFGTGTKLTVL

SEQ ID NO: 301 - protein, 242 aa, synthetic construct
  REGION 1..242: note = Description of Artificial Sequence: Synthetic single chain variable fragment
QVQLQESGPGLVKPSETLSLTCTVSGVSLPDYGVSWIRQPPGKGLEWIGVIWGSETTYYSSSLKSRVTISKDNSKNQVSLKLSSVTAADTAVYYCAKHYYYGGSYAMDYWGQGTLVTVSSGGGGSGGGGSGGGGSEIVMTQSPATLSLSPGERATLSCRASQDISKYLNWYQQKPGQAPRLLIYHTSRLHSGIPARFSGSGSGTDYTLTISSLQPEDFAVYFCQQGNTLPYTFGQGTKLEIK

SEQ ID NO: 302 - protein, 242 aa, synthetic construct
  REGION 1..242: note = Description of Artificial Sequence: Synthetic single chain variable fragment
QVQLQESGPGLVKPSETLSLTCTVSGVSLPDYGVSWIRQPPGKGLEWIGVIWGSETTYYQSSLKSRVTISKDNSKNQVSLKLSSVTAADTAVYYCAKHYYYGGSYAMDYWGQGTLVTVSSGGGGSGGGGSGGGGSEIVMTQSPATLSLSPGERATLSCRASQDISKYLNWYQQKPGQAPRLLIYHTSRLHSGIPARFSGSGSGTDYTLTISSLQPEDFAVYFCQQGNTLPYTFGQGTKLEIK

SEQ ID NO: 303 - protein, 246 aa, synthetic construct
  REGION 1..246: note = Description of Artificial Sequence: Synthetic single chain variable fragment
EVQLVESGGGLVQPGRSLRLSCAASGFTFDDYAMHWVRQAPGKGLEWVSGISWNSGRIGYADSVKGRFTISRDNAKNSLFLQMNSLRAEDTAVYYCARDQGYHYYDSAEHAFDIWGQGTVVTVSSGGGGSGGGGSGGGGSQSALTQPRSVSGFPGQSVTISCTGTTSDDVSWYQQHPGKAPQLMLYDVSKRPSGVPHRFSGSRSGRAASLIISGLQTEDEADYFCSSYAGRYNSVLFGGGTKLTVL

SEQ ID NO: 304 - protein, 249 aa, synthetic construct
  REGION 1..249: note = Description of Artificial Sequence: Synthetic single chain variable fragment
EVQLVQSGGGLVQPGRSLRLSCAASGFTFDDYAMHWVRQAPGKGLEWVSGISWNSGSIGYADSVKGRFTISRDNAKNSLYLQMNSLRAEDTAVYYCARDQGYHYYDSAEHAFDIWGQGTVVTVSSGGGGSGGGGSGGGGSEIVLTQSPATLSLSPGETATLSCRASQSINHYLAWYQQKPGQAPRLLIYDASNRATGIPARFSGSGSGTDFTLTISSLEPEDFATYYCQQSYSHPRMYTFGQGTKLDIK

SEQ ID NO: 305 - protein, 249 aa, synthetic construct
  REGION 1..249: note = Description of Artificial Sequence: Synthetic single chain variable fragment
QMQLVQSGGGLVQPGRSLRLSCAASGFTFDDYAMHWVRQAPGKGLEWVSGISWNSGSIGYADSVKGRFTISRDNAKNSLYLQMNSLRAEDTAVYYCARDQGYHYYDSAEHAFDIWGQGTVVTVSSGGGGSGGGGSGGGGSAIRMTQSPSSLSASVGDRVTVTCQASQDISNYLNWYQQKPGRAPKLLIYDASNVKAGVPSRFSGGGSGTDFTLTISSLQPEDFATYYCQQSYSTPQAYTFGQGTKLEIK

SEQ ID NO: 306 - protein, 252 aa, synthetic construct; identical to SEQ ID NO: 288
  REGION 1..252: note = Description of Artificial Sequence: Synthetic single chain variable fragment

SEQ ID NO: 307 - protein, 495 aa, synthetic construct
  REGION 1..495: note = Description of Artificial Sequence: Synthetic single chain variable fragment
METDTLLLWVLLLWVPGSTGEVQLQQSGPELIKPGASVKMSCKASGYTFTSYVMHWVKQKPGQGLEWIGYINPYNDGTKYNEKFKGKATLTSDKSSSTAYMELSSLTSEDSAVYYCARGTYYYGSRVFDYWGQGTTLTVSSGGGGSGGGGSGGGGSDIVMTQAAPSIPVTPGESVSISCRSSKSLLNSNGNTYLYWFLQRPGQSPQLLIYRMSNLASGVPDRFSGSGSGTAFTLRISRVEAEDVGVYYCMQHLEYPFTFGAGTKLELKRSDPTTTPAPRPPTPAPTIASQPLSLRPEACRPAAGGAVHTRGLDFACDIYIWAPLAGTCGVLLLSLVITLYCKRGRKKLLYIFKQPFMRPVQTTQEEDGCSCRFPEEEEGGCELRVKFSRSADAPAYQQGQNQLYNELNLGRREEYDVLDKRRGRDPEMGGKPRRKNPQEGLYNELQKDKMAEAYSEIGMKGERRRGKGHDGLYQGLSTATKDTYDALHMQALPPR

SEQ ID NO: 308 - protein, 247 aa, synthetic construct
  REGION 1..247: note = Description of Artificial Sequence: Synthetic single chain variable fragment
EIVMTQSPATLSLSPGERATLSCRASQDISKYLNWYQQKPGQAPRLLIYHTSRLHSGIPARFSGSGSGTDYTLTISSLQPEDFAVYFCQQGNTLPYTFGQGTKLEIKGGGGSGGGGSGGGGSGGGGSQVQLQESGPGLVKPSETLSLTCTVSGVSLPDYGVSWIRQPPGKGLEWIGVIWGSETTYYSSSLKSRVTISKDNSKNQVSLKLSSVTAADTAVYYCAKHYYYGGSYAMDYWGQGTLVTVSS

SEQ ID NO: 309 - protein, 251 aa, synthetic construct
  REGION 1..251: note = Description of Artificial Sequence: Synthetic single chain variable fragment
QVQLVESGGGLVQPGRSLRLSCAASGFTFDDYAMHWVRQAPGKGLEWVSGISWNSGRIGYADSVKGRFTISRDNAKNSLFLQMNSLRAEDTAVYYCARDQGYHYYDSAEHAFDIWGQGTMVTVSSGGGGSGGGGSGGGGSQAVLTQPRSVSGSPGQSVTISCTGISSGVDSHRYVSWYQHHPGKAPKLMIYDFSKRPSGVPDRFSGSKSGNTASLTISGLQAEDEADYYCSSYAAISPNYVFGTGTKLTVL

SEQ ID NO: 310 - protein, 250 aa, synthetic construct
  REGION 1..250: note = Description of Artificial Sequence: Synthetic single chain variable fragment
QVQLVESGGGLVQPGRSLRLSCAASGFTFDDYAMHWVRQAPGKGLEWVSGISWNSGRIGYADSVKGRFTISRDNAKNSLFLQMNSLRAEDTAVYYCARDQGYHYYDSAEHAFDIWGQGTVVTVSSGGGGSGGGGSGGGGSQSALTQPASVSGSPGHSITISCTGTRSDVGGFDYVSWYQHNPGKAPKLIIYDVTKRPSGVSNRFSGAKSGITASLTISGLQAEDEADYYCTSYRPGPTFVFGTGTKLTVL

SEQ ID NO: 311 - protein, 247 aa, synthetic construct
  REGION 1..247: note = Description of Artificial Sequence: Synthetic single chain variable fragment
EVQLVQSGGGLVQPGRSLRLSCAASGFTFDDYAMHWVRQAPGKGLEWVSGISWNSGSIGYADSVKGRFTISRDNAKNSLYLQMNSLRAEDTAVYYCARDQGYHYYDSAEHAFDIWGQGTVVTVSSGGGGSGGGGSGGGGSDIQLTQSPSTLSASVGDRVTITCRASQSISRWLAWYQQKPGKAPKLLIYDASNLETGVPSRFSGSGSGTDFTFTISSLQPEDIATYYCQQYDNLPLTFGGGTKVEIK

SEQ ID NO: 312 - protein, 248 aa, synthetic construct
  REGION 1..248: note = Description of Artificial Sequence: Synthetic single chain variable fragment
QMQLVQSGGGLVQPGRSLRLSCAASGFTFDDYAMHWVRQAPGKGLEWVSGISWNSGSIGYADSVKGRFTISRDNAKNSLYLQMNSLRAEDTAVYYCARDQGYHYYDSAEHAFDIWGQGTVVTVSSGGGGSGGGGSGGGGSAIRMTQSPSTLSASVGDRVTITCRASQSISHYLAWYQQKPGKAPKLLIFDASRLASGVPSRFSGSGSGTDFTLTISSLQPEDFATYYCQQSYGAPMFTFGPGTRVDLK

SEQ ID NO: 313 - protein, 242 aa, synthetic construct
  REGION 1..242: note = Description of Artificial Sequence: Synthetic single chain variable fragment
DIQMTQTTSSLSASLGDRVTISCRASQDISKYLNWYQQKPDGTVKLLIYHTSRLHSGVPSRFSGSGSGTDYSLTISNLEQEDIATYFCQQGNTLPYTFGGGTKLEITGGGGSGGGGSGGGGSEVKLQESGPGLVAPSQSLSVTCTVSGVSLPDYGVSWIRQPPRKGLEWLGVIWGSETTYYNSALKSRLTIIKDNSKSQVFLKMNSLQTDDTAIYYCAKHYYYGGSYAMDYWGQGTSVTVSS

SEQ ID NO: 314 - protein, 251 aa, synthetic construct
  REGION 1..251: note = Description of Artificial Sequence: Synthetic single chain variable fragment
EVQLVESGGGLVQPGRSLRLSCAASGFTFDDYAMHWVRQAPGKGLEWVSGISWNSGRIGYADSVKGRFTISRDNAKNSLFLQMNSLRAEDTAVYYCARDQGYHYYDSAEHAFDIWGQGTMVTVSSGGGGSGGGGSGGGGSQSALTQPASVSGSPGQSITISCTGTSSDVGAYNFVSWYQQLPGTAPKFLIYDNNKRPPGIPDRFSGSKSGTSATLGITGLQTGDEADYYCATWDSGLSAVVFGGGTKLTVL

SEQ ID NO: 315 - protein, 247 aa, synthetic construct
  REGION 1..247: note = Description of Artificial Sequence: Synthetic single chain variable fragment
EIVMTQSPATLSLSPGERATLSCRASQDISKYLNWYQQKPGQAPRLLIYHTSRLHSGIPARFSGSGSGTDYTLTISSLQPEDFAVYFCQQGNTLPYTFGQGTKLEIKGGGGSGGGGSGGGGSGGGGSQVQLQESGPGLVKPSETLSLTCTVSGVSLPDYGVSWIRQPPGKGLEWIGVIWGSETTYYQSSLKSRVTISKDNSKNQVSLKLSSVTAADTAVYYCAKHYYYGGSYAMDYWGQGTLVTVSS

SEQ ID NO: 316 - protein, 250 aa, synthetic construct
  REGION 1..250: note = Description of Artificial Sequence: Synthetic single chain variable fragment
EVQLVESGGGLVQPGRSLRLSCAASGFTFDDYAMHWVRQAPGKGLEWVSGISWNSGRIGYADSVKGRFTISRDNAKNSLFLQMNSLRAEDTAVYYCARDQGYHYYDSAEHAFDIWGQGTMVTVSSGGGGSGGGGSGGGGSQSALTQPASVSGSPGQSITIFCTGTSSDVGGYNYVSWYQQLPGTAPKLLIYSNNQRPSGVPDRFSGSKSGTSASLAISGLRSEDEADYYCAAWDDSLSVVFGGGTKLTVL

SEQ ID NO: 317 - protein, 252 aa, synthetic construct
  REGION 1..252: note = Description of Artificial Sequence: Synthetic single chain variable fragment
EVQLQQSGPELIKPGASVKMSCKASGYTFTSYVMHWVKQKPGQGLEWIGYINPYNDGTKYNEKFKGKATLTSDKSSSTAYMELSSLTSEDSAVYYCARGTYYYGSRVFDYWGQGTTLTVSSGGGGSGGGGSGGGGSDIVMTQAAPSIPVTPGESVSISCRSSKSLLNSNGNTYLYWFLQRPGQSPQLLIYRMSNLASGVPDRFSGSGSGTAFTLRISRVEAEDVGVYYCMQHLEYPFTFGAGTKLELKRSDP

SEQ ID NO: 318 - protein, 247 aa, synthetic construct
  REGION 1..247: note = Description of Artificial Sequence: Synthetic single chain variable fragment
QVQLQESGPGLVKPSETLSLTCTVSGVSLPDYGVSWIRQPPGKGLEWIGVIWGSETTYYSSSLKSRVTISKDNSKNQVSLKLSSVTAADTAVYYCAKHYYYGGSYAMDYWGQGTLVTVSSGGGGSGGGGSGGGGSGGGGSEIVMTQSPATLSLSPGERATLSCRASQDISKYLNWYQQKPGQAPRLLIYHTSRLHSGIPARFSGSGSGTDYTLTISSLQPEDFAVYFCQQGNTLPYTFGQGTKLEIK

SEQ ID NO: 319 - protein, 247 aa, synthetic construct
  REGION 1..247: note = Description of Artificial Sequence: Synthetic single chain variable fragment
QVQLQESGPGLVKPSETLSLTCTVSGVSLPDYGVSWIRQPPGKGLEWIGVIWGSETTYYQSSLKSRVTISKDNSKNQVSLKLSSVTAADTAVYYCAKHYYYGGSYAMDYWGQGTLVTVSSGGGGSGGGGSGGGGSGGGGSEIVMTQSPATLSLSPGERATLSCRASQDISKYLNWYQQKPGQAPRLLIYHTSRLHSGIPARFSGSGSGTDYTLTISSLQPEDFAVYFCQQGNTLPYTFGQGTKLEIK

SEQ ID NO: 320 - protein, 249 aa, synthetic construct
  REGION 1..249: note = Description of Artificial Sequence: Synthetic single chain variable fragment
EVQLVESGGGLVQPGRSLRLSCAASGFTFDDYAMHWVRQAPGKGLEWVSGISWNSGRIGYADSVKGRFTISRDNAKNSLFLQMNSLRAEDTAVYYCARDQGYHYYDSAEHAFDIWGQGTVVTVSSGGGGSGGGGSGGGGSQSVLTQPPSVSAAPGQEVTISCSGSSSNIGNNYVSWYQQLPGTAPKLLIYDNDKRPSGIPDRFSGSKSGTSATLGITGLQTGDEADYYCGTWDGNLSAVFGGGTKVTVL

SEQ ID NO: 321 - protein, 251 aa, synthetic construct
  REGION 1..251: note = Description of Artificial Sequence: Synthetic single chain variable fragment
EVQLVESGGGLVQPGRSLRLSCAASGFTFDDYAMHWVRQAPGKGLEWVSGISWNSGRIGYADSVKGRFTISRDNAKNSLFLQMNSLRAEDTAVYYCARDQGYHYYDSAEHAFDIWGQGTMVTVSSGGGGSGGGGSGGGGSQAVLTQPRSVSGSPGQSVTISCTGISSGVDSHRYVSWYQHHPGKAPKLMIYDFSKRPSGVPDRFSGSKSGNTASLTISGLQAEDEADYYCCSYAAISPNYVFGTGTKLTVL

SEQ ID NO: 322 - protein, 247 aa, synthetic construct
  REGION 1..247: note = Description of Artificial Sequence: Synthetic single chain variable fragment
EIVMTQSPATLSLSPGERATLSCRASQDISKYLNWYQQKPGQAPRLLIYHTSRLHSGIPARFSGSGSGTDYTLTISSLQPEDFAVYFCQQGNTLPYTFGQGTKLEIKGGGGSGGGGSGGGGSGGGGSQVQLQESGPGLVKPSETLSLTCTVSGVSLPDYGVSWIRQPPGKGLEWIGVIWGSETTYYNSSLKSRVTISKDNSKNQVSLKLSSVTAADTAVYYCAKHYYYGGSYAMDYWGQGTLVTVSS

SEQ ID NO: 323 - protein, 241 aa, synthetic construct
  REGION 1..241: note = Description of Artificial Sequence: Synthetic single chain variable fragment
QVQLQQSGPELVKPGASVKISCKASGYAFSSSWMNWVKQRPGKGLEWIGRIYPGDEDTNYSGKFKDKATLTADKSSTTAYMQLSSLTSEDSAVYFCARSLLYGDYLDYWGQGTTLTVSSGGGGSGGGGSGGGGSQIVLTQSPAIMSASPGEKVTMTCSASSSVSYMHWYQQKSGTSPKRWIYDTSKLASGVPDRFSGSGSGTSYFLTINNMEAEDAATYYCQQWNINPLTFGAGTKLELKR

SEQ ID NO: 324 - protein, 248 aa, synthetic construct; identical to SEQ ID NO: 277
  REGION 1..248: note = Description of Artificial Sequence: Synthetic single chain variable fragment

SEQ ID NO: 325 - protein, 246 aa, synthetic construct; identical to SEQ ID NO: 281
  REGION 1..246: note = Description of Artificial Sequence: Synthetic single chain variable fragment

SEQ ID NO: 326 - protein, 252 aa, synthetic construct; identical to SEQ ID NO: 282
  REGION 1..252: note = Description of Artificial Sequence: Synthetic single chain variable fragment

SEQ ID NO: 327 - protein, 249 aa, synthetic construct; identical to SEQ ID NO: 283
  REGION 1..249: note = Description of Artificial Sequence: Synthetic single chain variable fragment

SEQ ID NO: 328 - protein, 249 aa, synthetic construct; identical to SEQ ID NO: 284
  REGION 1..249: note = Description of Artificial Sequence: Synthetic single chain variable fragment

SEQ ID NO: 329 - protein, 251 aa, synthetic construct; identical to SEQ ID NO: 285
  REGION 1..251: note = Description of Artificial Sequence: Synthetic single chain variable fragment

SEQ ID NO: 330 - protein, 252 aa, synthetic construct; identical to SEQ ID NO: 286
  REGION 1..252: note = Description of Artificial Sequence: Synthetic single chain variable fragment

SEQ ID NO: 331 - protein, 252 aa, synthetic construct; identical to SEQ ID NO: 286
  REGION 1..252: note = Description of Artificial Sequence: Synthetic single chain variable fragment

SEQ ID NO: 332 - protein, 249 aa, synthetic construct
  REGION 1..249: note = Description of Artificial Sequence: Synthetic single chain variable fragment
  MOD_RES 64..65: note = Any amino acid
  MOD_RES 68..69: note = Any amino acid
  MOD_RES 93: note = Any amino acid
  MOD_RES 98: note = Any amino acid
  MOD_RES 102: note = Any amino acid
  MOD_RES 104: note = Any amino acid
  MOD_RES 113: note = Any amino acid
  MOD_RES 145..146: note = Any amino acid
  MOD_RES 148..149: note = Any amino acid
  MOD_RES 233: note = Any amino acid
  MOD_RES 244: note = Any amino acid
QVQLVESGGGLVQPGRSLRLSCAASGFTFDDYAMHWVRQAPGKGLEWVSGISWNSGRIGYADSXXGRXXISRDNAKNSLFLQMNSLRAEDTAXYYCAXDQGXHXYDSAEHAFXIWGQGTVVTVSSGGGGSGGGGSGGGGSQSVLXXPXXASGSPGQSVTVSCTGTGRDIGAYDYVSWYQQHPGKAPKLLIYGVNKRPSGVPDRFSGSKSDNTASLTVSGLQVEDEADYYCSSXAGRKYVFGTGXKVTVL

SEQ ID NO: 333 - protein, 252 aa, synthetic construct; identical to SEQ ID NO: 288
  REGION 1..252: note = Description of Artificial Sequence: Synthetic single chain variable fragment

SEQ ID NO: 334 - protein, 252 aa, synthetic construct; identical to SEQ ID NO: 288
  REGION 1..252: note = Description of Artificial Sequence: Synthetic single chain variable fragment

SEQ ID NO: 335 - protein, 252 aa, synthetic construct; identical to SEQ ID NO: 288
  REGION 1..252: note = Description of Artificial Sequence: Synthetic single chain variable fragment

SEQ ID NO: 336 - protein, 252 aa, synthetic construct; identical to SEQ ID NO: 291
  REGION 1..252: note = Description of Artificial Sequence: Synthetic single chain variable fragment
  MOD_RES 76: note = Any amino acid
  MOD_RES 201: note = Any amino acid

SEQ ID NO: 337 - protein, 252 aa, synthetic construct; identical to SEQ ID NO: 286
  REGION 1..252: note = Description of Artificial Sequence: Synthetic single chain variable fragment

SEQ ID NO: 338 - protein, 250 aa, synthetic construct; identical to SEQ ID NO: 293
  REGION 1..250: note = Description of Artificial Sequence: Synthetic single chain variable fragment

SEQ ID NO: 339 - protein, 252 aa, synthetic construct; identical to SEQ ID NO: 294
  REGION 1..252: note = Description of Artificial Sequence: Synthetic single chain variable fragment

SEQ ID NO: 340 - protein, 236 aa, synthetic construct; identical to SEQ ID NO: 295
  REGION 1..236: note = Description of Artificial Sequence: Synthetic single chain variable fragment

SEQ ID NO: 341 - protein, 251 aa, synthetic construct; identical to SEQ ID NO: 296
  REGION 1..251: note = Description of Artificial Sequence: Synthetic single chain variable fragment

SEQ ID NO: 342 - protein, 246 aa, synthetic construct; identical to SEQ ID NO: 297
  REGION 1..246: note = Description of Artificial Sequence: Synthetic single chain variable fragment

SEQ ID NO: 343 - protein, 239 aa, synthetic construct; identical to SEQ ID NO: 298
  REGION 1..239: note = Description of Artificial Sequence: Synthetic single chain variable fragment

SEQ ID NO: 344 - protein, 250 aa, synthetic construct; identical to SEQ ID NO: 299
  REGION 1..250: note = Description of Artificial Sequence: Synthetic single chain variable fragment

SEQ ID NO: 345 - protein, 251 aa, synthetic construct; identical to SEQ ID NO: 300
  REGION 1..251: note = Description of Artificial Sequence: Synthetic single chain variable fragment

SEQ ID NO: 346 - protein, 273 aa, synthetic construct
  REGION 1..273: note = Description of Artificial Sequence: Synthetic single chain variable fragment
MALPVTALLLPLALLLHAARPEVQLQQSGPELIKPGASVKMSCKASGYTFTSYVMHWVKQKPGQGLEWIGYINPYNDGTKYNEKFKGKATLTSDKSSSTAYMELSSLTSEDSAVYYCARGTYYYGSRVFDYWGQGTTLTVSSGGGGSGGGGSGGGGSDIVMTQAAPSIPVTPGESVSISCRSSKSLLNSNGNTYLYWFLQRPGQSPQLLIYRMSNLASGVPDRFSGSGSGTAFTLRISRVEAEDVGVYYCMQHLEYPFTFGAGTKLELKRSDP

SEQ ID NO: 347 - protein, 270 aa, synthetic construct
  REGION 1..270: note = Description of Artificial Sequence: Synthetic single chain variable fragment
MALPVTALLLPLALLLHAARPEVKLQESGPGLVAPSQSLSVTCTVSGVSLPDYGVSWIRQPPRKGLEWLGVIWGSETTYYNSALKSRLTIIKDNSKSQVFLKMNSLQTDDTAIYYCAKHYYYGGSYAMDYWGQGTSVTVSSGGGGSGGGGSGGGGSDIQMTQTTSSLSASLGDRVTISCRASQDISKYLNWYQQKPDGTVKLLIYHTSRLHSGVPSRFSGSGSGTDYSLTISNLEQEDIATYFCQQGNTLPYTFGGGTKLEITRSDPTSS

SEQ ID NO: 348 - protein, 277 aa, synthetic construct
  REGION 1..277: note = Description of Artificial Sequence: Synthetic single chain variable fragment
MAPAMESPTLLCVALLFFAPDGVLAEVQLQQSGPELIKPGASVKMSCKASGYTFTSYVMHWVKQKPGQGLEWIGYINPYNDGTKYNEKFKGKATLTSDKSSSTAYMELSSLTSEDSAVYYCARGTYYYGSRVFDYWGQGTTLTVSSGGGGSGGGGSGGGGSDIVMTQAAPSIPVTPGESVSISCRSSKSLLNSNGNTYLYWFLQRPGQSPQLLIYRMSNLASGVPDRFSGSGSGTAFTLRISRVEAEDVGVYYCMQHLEYPFTFGAGTKLELKRSDP

SEQ ID NO: 349 - protein, 246 aa, synthetic construct; identical to SEQ ID NO: 303
  REGION 1..246: note = Description of Artificial Sequence: Synthetic single chain variable fragment

SEQ ID NO: 350 - protein, 249 aa, synthetic construct; identical to SEQ ID NO: 304
  REGION 1..249: note = Description of Artificial Sequence: Synthetic single chain variable fragment

SEQ ID NO: 351 - protein, 249 aa, synthetic construct; identical to SEQ ID NO: 305
  REGION 1..249: note = Description of Artificial Sequence: Synthetic single chain variable fragment

SEQ ID NO: 352 - protein, 252 aa, synthetic construct; identical to SEQ ID NO: 288
  REGION 1..252: note = Description of Artificial Sequence: Synthetic single chain variable fragment

SEQ ID NO: 353 - protein, 251 aa, synthetic construct; identical to SEQ ID NO: 309
  REGION 1..251: note = Description of Artificial Sequence: Synthetic single chain variable fragment

SEQ ID NO: 354 - protein, 250 aa, synthetic construct; identical to SEQ ID NO: 310
  REGION 1..250: note = Description of Artificial Sequence: Synthetic single chain variable fragment

SEQ ID NO: 355 - protein, 247 aa, synthetic construct; identical to SEQ ID NO: 311
  REGION 1..247: note = Description of Artificial Sequence: Synthetic single chain variable fragment

SEQ ID NO: 356 - protein, 248 aa, synthetic construct; identical to SEQ ID NO: 312
  REGION 1..248: note = Description of Artificial Sequence: Synthetic single chain variable fragment

SEQ ID NO: 357 - protein, 251 aa, synthetic construct; identical to SEQ ID NO: 314
  REGION 1..251: note = Description of Artificial Sequence: Synthetic single chain variable fragment

SEQ ID NO: 358 - protein, 250 aa, synthetic construct; identical to SEQ ID NO: 316
  REGION 1..250: note = Description of Artificial Sequence: Synthetic single chain variable fragment

SEQ ID NO: 359 - protein, 249 aa, synthetic construct; identical to SEQ ID NO: 320
  REGION 1..249: note = Description of Artificial Sequence: Synthetic single chain variable fragment

SEQ ID NO: 360 - protein, 251 aa, synthetic construct; identical to SEQ ID NO: 321
  REGION 1..251: note = Description of Artificial Sequence: Synthetic single chain variable fragment

SEQ ID NO: 361 - protein, 249 aa, synthetic construct; identical to SEQ ID NO: 284
  REGION 1..249: note = Description of Artificial Sequence: Synthetic single chain variable fragment

SEQ ID NO: 362 - protein, 242 aa, synthetic construct; identical to SEQ ID NO: 275
  REGION 1..242: note = Description of Artificial Sequence: Synthetic single chain variable fragment

SEQ ID NO: 363 - protein, 245 aa, synthetic construct
  REGION 1..245: note = Description of Artificial Sequence: Synthetic single chain variable fragment
DIQMTQTTSSLSASLGDRVTISCRASQDISKYLNWYQQKPDGTVKLLIYHTSRLHSGVPSRFSGSGSGTDYSLTISNLEQEDIATYFCQQGNTLPYTFGGGTKLEITGSTSGSGKPGSGEGSTKGEVKLQESGPGLVAPSQSLSVTCTVSGVSLPDYGVSWIRQPPRKGLEWLGVIWGSETTYYNSALKSRLTIIKDNSKSQVFLKMNSLQTDDTAIYYCAKHYYYGGSYAMDYWGQGTSVTVSS

SEQ ID NO: 364 - protein, 119 aa, synthetic construct
  REGION 1..119: note = Description of Artificial Sequence: Synthetic single chain variable fragment
QVQLLESGAELVRPGSSVKISCKASGYAFSSYWMNWVKQRPGQGLEWIGQIYPGDGDTNYNGKFKGQATLTADKSSSTAYMQLSGLTSEDSAVYSCARKTISSVVDFYFDYWGQGTTVT

SEQ ID NO: 365 - protein, 438 aa, synthetic construct
  REGION 1..438: note = Description of Artificial Sequence: Synthetic single chain variable fragment
DIQMTQTTSSLSASLGDRVTISCRASQDISKYLNWYQQKPDGTVKLLIYHTSRLHSGVPSRFSGSGSGTDYSLTISNLEQEDIATYFCQQGNTLPYVKLQESGPGLVAPSQSLSVTCTVSGVSLPDYGVSWIRQPPRKGLEWLGVIWGSETTYYNSALKSRLTIIKDNSKSQVFLKMNSLQTDDTAIYYCAKHYYYGGSYAMDYWGQGTSVTVSSTTTPAPRPPTPAPTIASQPLSLRPEACRPAAGGAVHTRGLDFACDIYIWAPLAGTCGVLLLSLVITLYCKRGRKKLLYIFKQPFMRPVQTTQEEDGCSCRFPEEEEGGCELRVKFSRSADAPAYKQGQNQLYNELNLGRREEYDVLDKRRGRDPEMGGKPRRKNPQEGLYNELQKDKMAEAYSEIGMKGERRRGKGHDGLYQGLSTATKDTYDALHMQALPPR

SEQ ID NO: 366 - protein, 272 aa, synthetic construct
  REGION 1..272: note = Description of Artificial Sequence: Synthetic single chain variable fragment
MALPVTALLLPLALLLHAARPEVQLQQSGPELIKPGASVKMSCKASGYTFTSYVMHWVKQKPGQGLEWIGYINPYNDGTKYNEKFKGKATLTSDKSSSTAYMELSSLTSEDSAVYYCARGTYYYGSRVFDYWGQGTTLTVSSGGGGSGGGGSGGGGSDIVMTQAAPSIPVTPGESVSISCRSSKSLLNSNGNTYLYWFLQRPGQSPQLLIYRMSNLASGVPDRFSGSGSGTAFTLRISRVEAEDVGVYYCMQHLEYPFTFGAGTKLELKRSD

SEQ ID NO: 367 - protein, 267 aa, synthetic construct
  REGION 1..267: note = Description of Artificial Sequence: Synthetic single chain variable fragment
MALPVTALLLPLALLLHAARPEVQLQQSGPDLVKPGASVKISCKASGYSFTGYYMHWVKQSHGKSLEWIGRINPNNGVTLYNQKFKDKAILTVDKSSTTAYMELRSLTSEDSAVYYCARSTMITNYVMDYWGQVTSVTVSSGGGGSGGGGSGGGGSSIVMTQTPTFLLVSAGDRVTITCKASQSVSNDVAWYQQKPGQSPTLLISYTSSRYAGVPDRFIGSGYGTDFTFTISTLQAEDLAVYFCQQDYNSPPTFGGGTKLEIKRSDP

SEQ ID NO: 368 - protein, 270 aa, synthetic construct; identical to SEQ ID NO: 347
  REGION 1..270: note = Description of Artificial Sequence: Synthetic single chain variable fragment

SEQ ID NO: 369 - protein, 277 aa, synthetic construct; identical to SEQ ID NO: 348
  REGION 1..277: note = Description of Artificial Sequence: Synthetic single chain variable fragment

SEQ ID NO: 370 - protein, 242 aa, synthetic construct; identical to SEQ ID NO: 280
  REGION 1..242: note = Description of Artificial Sequence: Synthetic single chain variable fragment

SEQ ID NO: 371 - protein, 242 aa, synthetic construct; identical to SEQ ID NO: 301
  REGION 1..242: note = Description of Artificial Sequence: Synthetic single chain variable fragment

SEQ ID NO: 372 - protein, 242 aa, synthetic construct; identical to SEQ ID NO: 302
  REGION 1..242: note = Description of Artificial Sequence: Synthetic single chain variable fragment

SEQ ID NO: 373 - protein, 247 aa, synthetic construct; identical to SEQ ID NO: 308
  REGION 1..247: note = Description of Artificial Sequence: Synthetic single chain variable fragment

SEQ ID NO: 374 - protein, 247 aa, synthetic construct; identical to SEQ ID NO: 315
  REGION 1..247: note = Description of Artificial Sequence: Synthetic single chain variable fragment

SEQ ID NO: 375 - protein, 247 aa, synthetic construct; identical to SEQ ID NO: 318
  REGION 1..247: note = Description of Artificial Sequence: Synthetic single chain variable fragment

SEQ ID NO: 376 - protein, 247 aa, synthetic construct; identical to SEQ ID NO: 319
  REGION 1..247: note = Description of Artificial Sequence: Synthetic single chain variable fragment

SEQ ID NO: 377 - protein, 247 aa, synthetic construct; identical to SEQ ID NO: 322
  REGION 1..247: note = Description of Artificial Sequence: Synthetic single chain variable fragment

SEQ ID NO: 378 - protein, 247 aa, synthetic construct; identical to SEQ ID NO: 276
  REGION 1..247: note = Description of Artificial Sequence: Synthetic single chain variable fragment

SEQ ID NO: 379 - protein, 242 aa, synthetic construct; identical to SEQ ID NO: 278
  REGION 1..242: note = Description of Artificial Sequence: Synthetic single chain variable fragment

SEQ ID NO: 380 - protein, 495 aa, synthetic construct; identical to SEQ ID NO: 307
  REGION 1..495: note = Description of Artificial Sequence: Synthetic single chain variable fragment

SEQ ID NO: 381 - protein, 242 aa, synthetic construct; identical to SEQ ID NO: 279
  REGION 1..242: note = Description of Artificial Sequence: Synthetic single chain variable fragment

SEQ ID NO: 382 - protein, 242 aa, synthetic construct; identical to SEQ ID NO: 313
  REGION 1..242: note = Description of Artificial Sequence: Synthetic single chain variable fragment

SEQ ID NO: 383 - protein, 252 aa, synthetic construct; identical to SEQ ID NO: 317
  REGION 1..252: note = Description of Artificial Sequence: Synthetic single chain variable fragment

SEQ ID NO: 384 - protein, 250 aa, synthetic construct
  REGION 1..250: note = Description of Artificial Sequence: Synthetic single chain variable fragment
DIQMTQTTSSLSASLGDRVTISCRASQDISKYLNWYQQKPDGTVKLLIYHTSRLHSGVPSRFSGSGSGTDYSLTISNLEQEDIATYFCQQGNTLPYTFGGGTKLEITKAGGGGSGGGGSGGGGSGGGGSEVKLQESGPGLVAPSQSLSVTCTVSGVSLPDYGVSWIRQPPRKGLEWLGVIWGSETTYYNSALKSRLTIIKDNSKSQVFLKMNSLQTDDTAIYYCAKHYYYGGSYAMDYWGQGTSVTVSSD

SEQ ID NO: 385 - protein, 242 aa, synthetic construct; identical to SEQ ID NO: 313
  REGION 1..242: note = Description of Artificial Sequence: Synthetic single chain variable fragment

SEQ ID NO: 386 - protein, 251 aa, synthetic construct
  REGION 1..251: note = Description of Artificial Sequence: Synthetic single chain variable fragment
EVQLQQSGPELIKPGASVKMSCKASGYTFTSYVMHWVKQKPGQGLEWIGYINPYNDGTKYNEKFKGKATLTSDKSSSTAYMELSSLTSEDSAVYYCARGTYYYGSRVFDYWGQGTTLTVSSGGGGSGGGGSGGGGSDIVMTQAAPSIPVTPGESVSISCRSSKSLLNSNGNTYLYWFLQRPGQSPQLLIYRMSNLASGVPDRFSGSGSGTAFTLRISRVEAEDVGVYYCMQHLEYPFTFGAGTKLELKRAD

SEQ ID NO: 387 - protein, 271 aa, synthetic construct
  REGION 1..271: note = Description of Artificial Sequence: Synthetic single chain variable fragment
MALPVTALLLPLALLLHAARPEIVMTQSPATLSLSPGERATLSCRASQDISKYLNWYQQKPGQAPRLLIYHTSRLHSGIPARFSGSGSGTDYTLTISSLQPEDFAVYFCQQGNTLPYTFGQGTKLEIKGGGGSGGGGSGGGGSQVQLQESGPGLVKPSETLSLTCTVSGVSLPDYGVSWIRQPPGKGLEWIGVIWGSETTYYSSSLKSRVTISKDNSKNQVSLKLSSVTAADTAVYYCAKHYYYGGSYAMDYWGQGTLVTVSSHHHHHHHH

SEQ ID NO: 388 - protein, 248 aa, synthetic construct; identical to SEQ ID NO: 277
  REGION 1..248: note = Description of Artificial Sequence: Synthetic single chain variable fragment

SEQ ID NO: 389 - protein, 246 aa, synthetic construct; identical to SEQ ID NO: 281
  REGION 1..246: note = Description of Artificial Sequence: Synthetic single chain variable fragment

SEQ ID NO: 390 - protein, 252 aa, synthetic construct; identical to SEQ ID NO: 282
  REGION 1..252: note = Description of Artificial Sequence: Synthetic single chain variable fragment

SEQ ID NO: 391 - protein, 249 aa, synthetic construct; identical to SEQ ID NO: 283
  REGION 1..249: note = Description of Artificial Sequence: Synthetic single chain variable fragment

SEQ ID NO: 392 - protein, 251 aa, synthetic construct; identical to SEQ ID NO: 285
  REGION 1..251: note = Description of Artificial Sequence: Synthetic single chain variable fragment

SEQ ID NO: 393 - protein, 252 aa, synthetic construct; identical to SEQ ID NO: 286
  REGION 1..252: note = Description of Artificial Sequence: Synthetic single chain variable fragment

SEQ ID NO: 394 - protein, 249 aa, synthetic construct; identical to SEQ ID NO: 332
  REGION 1..249: note = Description of Artificial Sequence: Synthetic single chain variable fragment
  MOD_RES 64..65: note = Any amino acid
  MOD_RES 68..69: note = Any amino acid
  MOD_RES 93: note = Any amino acid
  MOD_RES 98: note = Any amino acid
  MOD_RES 102: note = Any amino acid
  MOD_RES 104: note = Any amino acid
  MOD_RES 113: note = Any amino acid
  MOD_RES 145..146: note = Any amino acid
  MOD_RES 148..149: note = Any amino acid
  MOD_RES 233: note = Any amino acid
  MOD_RES 244: note = Any amino acid

SEQ ID NO: 395 - protein, 252 aa, synthetic construct; identical to SEQ ID NO: 291
  REGION 1..252: note = Description of Artificial Sequence: Synthetic single chain variable fragment
  MOD_RES 76: note = Any amino acid
  MOD_RES 201: note = Any amino acid

SEQ ID NO: 396 - protein, 250 aa, synthetic construct; identical to SEQ ID NO: 293
  REGION 1..250: note = Description of Artificial Sequence: Synthetic single chain variable fragment

SEQ ID NO: 397 - protein, 252 aa, synthetic construct; identical to SEQ ID NO: 294
  REGION 1..252: note = Description of Artificial Sequence: Synthetic single chain variable fragment

SEQ ID NO: 398 - protein, 236 aa, synthetic construct; identical to SEQ ID NO: 295
  REGION 1..236: note = Description of Artificial Sequence: Synthetic single chain variable fragment

SEQ ID NO: 399 - protein, 251 aa, synthetic construct; identical to SEQ ID NO: 296
  REGION 1..251: note = Description of Artificial Sequence: Synthetic single chain variable fragment

SEQ ID NO: 400 - protein, 246 aa, synthetic construct; identical to SEQ ID NO: 297
  REGION 1..246: note = Description of Artificial Sequence: Synthetic single chain variable fragment

SEQ ID NO: 401 - protein, 239 aa, synthetic construct; identical to SEQ ID NO: 298
  REGION 1..239: note = Description of Artificial Sequence: Synthetic single chain variable fragment

SEQ ID NO: 402 - protein, 250 aa, synthetic construct; identical to SEQ ID NO: 299
  REGION 1..250: note = Description of Artificial Sequence: Synthetic single chain variable fragment

SEQ ID NO: 403 - protein, 251 aa, synthetic construct; identical to SEQ ID NO: 300
  REGION 1..251: note = Description of Artificial Sequence: Synthetic single chain variable fragment

SEQ ID NO: 404 - protein, 246 aa, synthetic construct; identical to SEQ ID NO: 303
  REGION 1..246: note = Description of Artificial Sequence: Synthetic single chain variable fragment

SEQ ID NO: 405 - protein, 249 aa, synthetic construct; identical to SEQ ID NO: 304
  REGION 1..249: note = Description of Artificial Sequence: Synthetic single chain variable fragment

SEQ ID NO: 406 - protein, 249 aa, synthetic construct; identical to SEQ ID NO: 305
  REGION 1..249: note = Description of Artificial Sequence: Synthetic single chain variable fragment

SEQ ID NO: 407 - protein, 252 aa, synthetic construct; identical to SEQ ID NO: 288
  REGION 1..252: note = Description of Artificial Sequence: Synthetic single chain variable fragment

SEQ ID NO: 408 - protein, 251 aa, synthetic construct; identical to SEQ ID NO: 309
  REGION 1..251: note = Description of Artificial Sequence: Synthetic single chain variable fragment

SEQ ID NO: 409 - protein, 250 aa, synthetic construct; identical to SEQ ID NO: 310
  REGION 1..250: note = Description of Artificial Sequence: Synthetic single chain variable fragment

SEQ ID NO: 410 - protein, 247 aa, synthetic construct; identical to SEQ ID NO: 311
  REGION 1..247: note = Description of Artificial Sequence: Synthetic single chain variable fragment

SEQ ID NO: 411 - protein, 248 aa, synthetic construct; identical to SEQ ID NO: 312
  REGION 1..248: note = Description of Artificial Sequence: Synthetic single chain variable fragment

SEQ ID NO: 412 - protein, 251 aa, synthetic construct; identical to SEQ ID NO: 314
  REGION 1..251: note = Description of Artificial Sequence: Synthetic single chain variable fragment

SEQ ID NO: 413 - protein, 250 aa, synthetic construct; identical to SEQ ID NO: 316
  REGION 1..250: note = Description of Artificial Sequence: Synthetic single chain variable fragment

SEQ ID NO: 414 - protein, 249 aa, synthetic construct; identical to SEQ ID NO: 320
  REGION 1..249: note = Description of Artificial Sequence: Synthetic single chain variable fragment

SEQ ID NO: 415 - protein, 251 aa, synthetic construct; identical to SEQ ID NO: 321
  REGION 1..251: note = Description of Artificial Sequence: Synthetic single chain variable fragment

SEQ ID NO: 416 - protein, 249 aa, synthetic construct; identical to SEQ ID NO: 284
  REGION 1..249: note = Description of Artificial Sequence: Synthetic single chain variable fragment

SEQ ID NO: 417 - protein, 277 aa, synthetic construct
  REGION 1..277: note = Description of Artificial Sequence: Synthetic single chain variable fragment
MAPAMESPTLLCVALLFFAPDGVLAEVQLQQSGPELIKPGASVKMSCKASGYTFTSYVMHWVKQKPGQGLEWIGYINPYNDGTKYNEKFKGKATLTSDKSSSTAYMELSSLTSEDSAVYYCARGTYYVGSRVFDYWGQGTTLTVSSGGGGSGGGGSGGGGSDIVMTQAAPSIPVTPGESVSISCRSSKSLLNSNGNTYLYWFLQRPGQSPQLLIYRMSNLASGVPDRFSGSGSGTAFTLRISRVEAEDVGVYVCMQHLEYPFTFGAGTKLELKRSDP

SEQ ID NO: 418 - protein, 242 aa, synthetic construct; identical to SEQ ID NO: 313
  REGION 1..242: note = Description of Artificial Sequence: Synthetic CD19 small scFv sequence

SEQ ID NO: 419 - protein, 112 aa, Homo sapiens
RVKFSRSADAPAYKQGQNQLYNELNLGRREEYDVLDKRRGRDPEMGGKPRRKNPQEGLYNELQKDKMAEAYSEIGMKGERRRGKGHDGLYQGLSTATKDTYDALHMQALPPR

SEQ ID NO: 420 - DNA, 726 bp, synthetic construct
  misc_feature 1..726: note = Description of Artificial Sequence: Synthetic CD19 small scFv sequence
  source 1..726: mol_type = other DNA
gacatccagatgacacagactacatcctccctgtctgcctctctgggagacagagtcaccatcagttgcagggcaagtcaggacattagtaaatatttaaattggtatcagcagaaaccagatggaactgttaaactcctgatctaccatacatcaagattacactcaggagtcccatcaaggttcagtggcagtgggtctggaacagattattctctcaccattagcaacctggagcaagaagatattgccacttacttttgccaacagggtaatacgcttccgtacacgttcggaggggggaccaagctggagatcacaggtggcggtggctcgggcggtggtgggtcgggtggcggcggatctgaggtgaaactgcaggagtcaggacctggcctggtggcgccctcacagagcctgtccgtcacatgcactgtctcaggggtctcattacccgactatggtgtaagctggattcgccagcctccacgaaagggtctggagtggctgggagtaatatggggtagtgaaaccacatactataattcagctctcaaatccagactgaccatcatcaaggacaactccaagagccaagttttcttaaaaatgaacagtctgcaaactgatgacacagccatttactactgtgccaaacattattactacggtggtagctatgctatggactactggggccaaggaacctcagtcaccgtctcctca

SEQ ID NO: 421 - protein, 120 aa, Homo sapiens
WRRKRKEKQSETSPKEFLTIYEDVKDLKTRRNHEQEQTFPGGGSTIYSMIQSQSSAPTSQEPAYTLYSLIQPSRKSGSRKRNHSPSFNSTIYEVIGKSQPKAQNPARLSRKELENFDVYS

SEQ ID NO: 422 - protein, 49 aa, Homo sapiens
HQRRKYRSNKGESPVEPAEPCRYSCPREEEGSTIPIQEDYRKPEPACSP

SEQ ID NO: 423 - protein, 110 aa, Homo sapiens
RRHQGKQNELSDTAGREINLVDAKLKSEQTEASTRQNSQVLLSETGIYDNDPDLCFRMQEGSEVYSNPCLEENKPGVYASLNHSVIGPNSRLARNVKEAPTEYASICVRS

SEQ ID NO: 424 - protein, 114 aa, Homo sapiens
CCLRRHQGKQNELSDTAGREINLVDAHLKSEQTEASTRQNSQVLLSETGIYDNDPDLCFRMQEGSEVYSNPCLEENKPGIVYASLNHSVIGPNSRLARNVKEAPTEYASICVRS

SEQ ID NO: 425 - protein, 27 aa, Homo sapiens
FWVLVVVGGVLACYSLLVTVAFIIFWV

SEQ ID NO: 426 - protein, 42 aa, Homo sapiens
KRGRKKLLYIFKQPFMRPVQTTQEEDGCSCRFPEEEEGGCEL

SEQ ID NO: 427 - protein, 44 aa, Homo sapiens
FWVRSKRSRLLHSDYMNMTPRRPGPTRKHYQPYAPPRDFAAYRS

SEQ ID NO: 428 - protein, 41 aa, Homo sapiens
RSKRSRGGHSDYMNMTPRRPGPTRKHYQPYAPPRDFAAYRS

SEQ ID NO: 429 - protein, 43 aa, Homo sapiens
RSKRSRGGHSDYIVINMTPRRPGPTRKHYQPYAPPRDFAAYRS

SEQ ID NO: 430 - protein, 220 aa, Homo sapiens
MLRLLLALNLFPSIQVTGNKILVKQSPMLVAYDNAVNLSCKYSYNLFSREFRASLHKGLDSAVEVCVVYGNYSQQLQVYSKTGFNCDGKLGNESVTFYLQNLYVNQTDIYFCKIEVMYPPPYLDNEKSNGTIIHVKGKHLCPSPLFPGPSKPFWVLVVVGGVLACYSLLVTVAFIIFWVRSKRSRLLHSDYMNMTPRRPGPTRKHYQPYAPPRDFAAYRS

SEQ ID NO: 431 - protein, 187 aa, Homo sapiens
RRACRKRIRQKLHLCYPVQTSQPKLELVDSRPRRSSTQLRSGASVTEPVAEERGLMSQPLMETCHSVGAAYLESLPLQDASPAGGPSSPRDLPEPRVSTEHTNNKIEKIYIMKADTVIVGTVKAELPEGRGLAGPAEPELEEELEADHTPHYPEQETEPPLGSCSDVMLSVEEEGKEDPLPTAASGK

SEQ ID NO: 432 - protein, 187 aa, Homo sapiens; identical to SEQ ID NO: 431

SEQ ID NO: 433 - protein, 54 aa, Homo sapiens
HIWQLRSQCMWPRETQLLLEVPPSTEDARSCQFPEEERGERSAEEKGRLGDLWV

SEQ ID NO: 434 - protein, 60 aa, Homo sapiens
CVKRRKPRGDVVKVIVSVQRKRQEAEGEATVIEALQAPPDVTTVAVEETIPSFTGRSPNH

SEQ ID NO: 435 - protein, 35 aa, Homo sapiens
TKKKYSSSVHDPNGEYMFMRAVNTAKKSRLTDVTL

SEQ ID NO: 436 - protein, 38 aa, Homo sapiens
CWLTKKKYSSSVHDPNGEYMFMRAVNTAKKSRLTDVTL

SEQ ID NO: 437 - protein, 54 aa, Homo sapiens
HLWRRQWRPRRFSALEQGIHPPQAQSKIEELEQEPEPEPEPEPEPEPEPEPEQL

SEQ ID NO: 438 - protein, 42 aa, Homo sapiens
ALYLLRRDQRLPPDAHKPPGGGSFRTPIQEEQADAHSTLAKI

SEQ ID NO: 439 - protein, 37 aa, Homo sapiens
RRDQRLPPDAHKPPGGGSFRTPIQEEQADAHSTLAKI

SEQ ID NO: 440 - protein, 42 aa, Homo sapiens
KRGRKKLLYIFKQPFMRPVQTIQEEDGCSCRFPEEEEGGCEL

SEQ ID NO: 441 - protein, 42 aa, Homo sapiens
KRGRKKLLYIFKQPFMRPVQTTQEEDGCSCRFPEEEEGGYEL

SEQ ID NO: 442 - protein, 225 aa, Homo sapiens
TGTTTPAPRPPTPAPTIASQPLSLRPEACRPAAGGAVHTRGLDFACDIYIWAPLAGTCGVLLLSLVITLYCKRGRKKLLYIFKQPFMRPVQTTQEEDGCSCRFPEEEEGGCELRVKFSRSADAPAYQQGQNQLYNELNLGRREEYDVLDKRRGRDPEMGGKPRRKNPQEGLYNELQKDKMAEAYSEIGMKGERRRGKGHDGLYQGLSTATKDTYDALHMQALPPR

SEQ ID NO: 443 - protein, 154 aa, Homo sapiens
KRGRKKLLYIFKQPFMRPVQTTQEEDGCSCRFPEEEEGGCELRVKFSRSADAPAYQQGQNQLYNELNLGRREEYDVLDKRRGRDPEMGGKPRRKNPQEGLYNELQKDKMAEAYSEIGMKGERRRGKGHDGLYQGLSTATKDTYDALHMQALPPR

SEQ ID NO: 444 - protein, 194 aa, Homo sapiens
KRIKPIVWPSLPDHKKTLEHLCKKPRKNLNVSFNPESFLDCQIHRVDDIQARDEVEGFLQDTFPQQLEESEKQRLGGDVQSPNCPSEDVVITPESFGRDSSLTCLAGNVSACDAPILSSSRSLDCRESGKNGPHVYQDLLLSLGTTNSTLPPPFSLQSGILTLNPVAQGQPILTSLGSNQEEAYVTMSSFYQNQ

SEQ ID NO: 445 - protein, 47 aa, Homo sapiens
RFSVVKRGRKKLLYIFKQPFMRPVQTTQEEDGCSCRFPEEEEGGCEL

SEQ ID NO: 446 - protein, 341 aa, Homo sapiens
RKKRKDAKNNEVSFSQIKPKKSKLIRVENFEAYFKKQQADSNCGFAEEYEDLKLVGISQPKYAAELAENRGKNRYNNVLPYDISRVKLSVQTHSTDDYINANYMPGYHSKKDFIATQGPLPNTLKDFWRMVWEKNVYAIIMLTKCVEQGRTKCEEYWPSKQAQDYGDITVAMTSEIVLPEWTIRDFTVKNIQTSESHPLRQFHFTSWPDHGVPDTTDLLINFRYLVRDYMKQSPPESPILVHCSAGVGRTGTFIAIDRLIYQIENENTVDVYGIVYDLRMHRPLMVQTEDQYVFLNQCVLDIVRSQKDSKVDLIYQNTTAMTIYENLAPVTTFGKTNGYIA

SEQ ID NO: 447 - protein, 48 aa, Homo sapiens
QRRKYRSNKGESPVEPAEPCHYSCPREEEGSTIPIQEDYRKPEPACSP

SEQ ID NO: 448 - protein, 6 aa, Homo sapiens
FAAYRS

SEQ ID NO: 449 - protein, 68 aa, Homo sapiens
FWVLVVVGGVLACYSLLVTVAFIIFWVRSKRSRLLHSDYMNMTPRRPGPTRKHYQPYAPPRDFAAYRS

SEQ ID NO: 450 - protein, 41 aa, Homo sapiens
RSKRSRLLHSDYMNMTPRRPGPTRKHYQPYAPPRDFAAYRS

SEQ ID NO: 451 - protein, 40 aa, Homo sapiens
SKRSRLLHSDYMNMTPRRPGPTRKHYQPYAPPRDFAAYRS

SEQ ID NO: 452 - protein, 106 aa, Homo sapiens
IEVMYPPPYLDNEKSNGTIIHVKGKHLCPSPLFPGPSKPFWVLVVVGGVLACYSLLVTVAFIIFWRSKRSRLLHSDYMNMTPRRPGPTRKHYQPYAPPRDFAAYRS

SEQ ID NO: 453 - protein, 200 aa, Homo sapiens
RSKRSRLLHSDYMNMTPRRPGPTRKHYQPYAPPRDFAAYRSRFSVVKRGRKKLLYIFKQPFMRPVQTTQEEDGCSCRFPEEEEGGCELRVKFSRSADAPAYQQGQNQLYNELNLGRREEYDVLDKRRGRDPEMGGKPRRKNPQEGLYNELQKDKMAEAYSEIGMKGERRRGKGHDGLYQGLSTATKDTYDALHMQALPPR

SEQ ID NO: 454 - protein, 222 aa, Homo sapiens
AAAIEVMYPPPYLDNEKSNGTIIHVKGKHLCPSPLFPGPSKPFWVLVVVGGVLACYSLLVTVAFIIFWVRSKRSRLLHSDYMNMTPRRPGPTRKHYQPYAPPRDFAAYRSRVKFSRSADAPAYQQGQNQLYNELNLGRREEYDVLDKRRGRDPEMGGKPRRKNPQEGLYNELQKDKMAEAYSEIGMKGERRRGKGHDGLYQGLSTATKDTYDALHMQALPPR

SEQ ID NO: 455 - protein, 188 aa, Homo sapiens
RSKRSRLLHSDYNMTPRRPGPTRKHYQPYAPPRDFAAYRSRDQRLPPDAHKPPGGGSFRTPIQEEQADAHSTLAKIRVKFSRSADAPAYQQGQNQLYNELNLGRREEYDVLDKRRGRDPEMGGKPRRKNPQEGLYNELQKDKMAEAYSEIGMKGERRRGKGHDGLYQGLSTATKDTYDALHMQALPPR

SEQ ID NO: 456 - protein, 70 aa, Homo sapiens
MFWVLVVVGGVLACYSLLVTVAFIIFWVKRGRKKLLYIFKQPFMRPVQTTQEEDGCSCRFPEEEEGGCEL

SEQ ID NO: 457 - protein, 108 aa, Homo sapiens
IEVMYPPPYLDNEKSNGTIIHVKGKHLCPSPLFPGPSKPFWVLVVVGGVLACYSLLVTVAFIIFWVKRGRKKLLYIFKQPFMRPVQTTQEEDGCSCRFPEEEEGGCEL

SEQ ID NO: 458 - protein, 153 aa, Homo sapiens
RSKRSRLLHSDYMNMTPRRPGPTRKHYQPYAPPRDFAAYRSRVKFSRSADAPAYQQGQNQLYNELNLGRREEYDVLDKRRGRDPEMGGKPRRKNPQEGLYNELQKDKMAEAYSEIGMKGERRRGKGHDGLYQGLSTATKDTYDALHMQALPPR

SEQ ID NO: 459 - protein, 151 aa, Homo sapiens
KRSRLLHSDYMNMTPRRPGPTRKHYQPYAPPRDFAAYRSRVKFSRSADAPAYQQGQNQLYNELNLGRREEYDVLDKRRGRDPEMGGKPRRKNPQEGLYNELQKDKMAEAYSEIGMKGERRRGKGHDGLYQGLSTATKDTYDALHMQALPPR

SEQ ID NO: 460 - protein, 171 aa, Homo sapiens
MEHSTFLSGLVLATLLSQVSPFKIPIEELEDRVFVNCNTSITWVEGTVGTLLSDITRLDLGKRILDPRGIYRCNGTDIYKDKESTVQVHYRMCQSCVELDPATVAGIIVTDVIATLLLALGVFCFAGHETGRLSGAADTQALLRNDQVYQPLRDRDDAQYSHLGGNWARNK

SEQ ID NO: 461 - protein, 127 aa, Homo sapiens
MEHSTFLSGLVLATLLSQVSPFKIPIEELEDRVFVNCNTSITWVEGTVGTLLSDITRLDLGKRILDPRGIYRCNGTDIYKDKESTVQVHYRTADTQALLRNDQVYQPLRDRDDAQYSHLGGNWARNK

SEQ ID NO: 462 - protein, 21 aa, Homo sapiens
DQVYQPLRDRDDAQYSHLGGN

SEQ ID NO: 463 - protein, 171 aa, Homo sapiens; identical to SEQ ID NO: 460

SEQ ID NO: 464 - protein, 127 aa, Homo sapiens; identical to SEQ ID NO: 461

SEQ ID NO: 465 - protein, 21 aa, Homo sapiens
DQVYQPLRDRDDAQYSHLGGN

SEQ ID NO: 466 - protein, 207 aa, Homo sapiens
MQSGTHWRVLGLCLLSVGVWGQDGNEEMGGITQTPYKVSISGTTVILTCPQYPGSEILWQHNDKNIGGDEDDKNIGSDEDHLSLKEFSELEQSGYYVCYPRGSKPEDANFYLYLRARVCENCMEMDVMSVATIVIVDICITGGLLLLVYYWSKNRKAKAKPVTRGAGAGGRQRGQNKERPPPVPNPDYEPIRKGQRDLYSGLNQRRI

SEQ ID NO: 467 - protein, 21 aa, Homo sapiens
NPDYEPIRKGQRDLYSGLNQR

SEQ ID NO: 468 - protein, 182 aa, Homo sapiens
MEQGKGLAVLILAIILLQGTLAQSIKGNHLVKVYDYQEDGSVLLTCDAEAKNITWFKDGKMIGFLTEDKKKWNLGSNAKDPRGMYQCKGSQNKSKPLQVYYRMCQNCIELNAATISGFLFAEIVSIFVLAVGVYFIAGQDGVRQSRASDKQTLLPNDQLYQPLKDREDDQYSHLQGNQLRRN

SEQ ID NO: 469 - protein, 21 aa, Homo sapiens
DQLYQPLKDREDDQYSHLQGN

SEQ ID NO: 470 - protein, 21 aa, Homo sapiens
DQLYQPLKDREDDQYSHLQGN

SEQ ID NO: 471 - protein, 182 aa, Homo sapiens; identical to SEQ ID NO: 468

SEQ ID NO: 472 - protein, 163 aa, Homo sapiens
MKWKALFTAAILQAQLPITEAQSFGLLDPKLCYLLDGILFIYGVILTALFLRVKFSRSADAPAYQQGQNQLYNELNLGRREEYDVLDKRRGRDPEMGGKPRRKNPQEGLYNELQKDKMAEAYSEIGMKGERRRGKGHDGLYQGLSTATKDTYDALHMQALPPR

SEQ ID NO: 473 - protein, 164 aa, Homo sapiens
MKWKALFTAAILQAQLPITEAQSFGLLDPKLCYLLDGILFIYGVILTALFLRVKFSRSADAPAYQQGQNQLYNELNLGRREEYDVLDKRRGRDPEMGGKPQRRKNPQEGLYNELQKDKMAEAYSEIGMKGERRRGKGHDGLYQGLSTATKDTYDALHMQALPPR

SEQ ID NO: 474 - protein, 164 aa, Homo sapiens; identical to SEQ ID NO: 473

SEQ ID NO: 475 - protein, 21 aa, Homo sapiens
NQLYNELNLGRREEYDVLDKR

SEQ ID NO: 476 - protein, 112 aa, Homo sapiens
RVKFSRSADAPAYQQGQNQLYNELNLGRREEYDVLDKRRGRDPEMGGKPRRKNPQEGLYNELQKDKMAEAYSEIGMKGERRRGKGHDGLYQGLSTATKDTYDALHMQALPPR

SEQ ID NO: 477 - protein, 21 aa, Homo sapiens
DGLYQGLSTATKDTYDALHMQ

SEQ ID NO: 478 - protein, 112 aa, Homo sapiens
RVKFSRSAEPPAYQQGQNQLYNELNLGRREEYDVLDKRRGRDPEMGGKPRRKNPQEGLYNELQKDKMAEAYSEIGMKGERRRGKGHDGLYQGLSTATKDTYDALHMQALPPR

SEQ ID NO: 479 - protein, 113 aa, Homo sapiens
RVKFSRSADAPAYQQGQNQLYNELNLGRREEYDVLDKRRGRDPEMGGKPQRRKNPQEGLYNELQKDKMAEAYSEIGMKGERRRGKGHDGLYQGLSTATKDTYDALHMQALPPR

SEQ ID NO: 480 - protein, 114 aa, Homo sapiens
RSRVKFSRSADAPAYQQGQNQLYNELNLGRREEYDVLDKRRGRDPEMGGKPRRKNPQEGLYNELQKDKMAEAYSEIGMKGERRRGKGHDGLYQGLSTATKDTYDALHMQALPPR

SEQ ID NO: 481 - protein, 98 aa, Homo sapiens
RVKFSRSADAPAYQQGEYDVLDKRRGRDPEMGGKPRRKNPQEGLYNELQKDKMAEAYSEIGMKGERRRGKGHDGLYQGLSTATKDTYDALHMQALPPR

SEQ ID NO: 482 - protein, 112 aa, Homo sapiens
RVKFSRSADAPAYQQGQNQLYNELNLGRREEVDVLDKRRGRDPEMGGKPRRKNPQEGLYNELQKDKMAEAYSEIGMKGERRRGKGHDGLYQGLSTATKDTYDALHMQALPPR

SEQ ID NO: 483 - protein, 173 aa, Homo sapiens
MIPAVVLLLLLLVEQAAALGEPQLCYILDAILFLVGIVLTLLVCRLKIQVRKAAITSYEKSRVKFSRSADAPAYQQGQNQLYNELNLGRREEYDVLDKRRGRDPEMGGKPRRKNPQEGLYNELQKDKMAEAVSEIGMKGERRRGKGHDGLYQGLSTATKDTYDALHMQALPPR

SEQ ID NO: 484 - protein, 113 aa, Homo sapiens
LRVKFSRSADAPAYQQGQNQLYNELNLGRREEYDVLDKRRGRDPEMGGKPRRKNPQEGLYNELQKDKMAEAYSEIGMKGERRRGKGHDGLYQGLSTATKDTYDALHMQALPPR

SEQ ID NO: 485 - protein, 60 aa, Homo sapiens
RVKFSRSADAPAYQQGQNQLYNELNLGRREEYDVLDKRRGRDPEMGGKPQRRKNPQEGLY

SEQ ID NO: 486 - protein, 114 aa, Homo sapiens
LRVKFSRSADAPAYQQGQNQLYNELNLGRREEYDVLDKRRGRDPEMGGKPQRRKNPQEGLYNELQKDKMAEAYSEIGMKGERRRGKGHDGLYQGLSTATKDTYDALHMQALPPR

SEQ ID NO: 487 - protein, 113 aa, Homo sapiens
RRVKFSRSADAPAYQQGQNQLYNELNLGRREEYDVLDKRRGRDPEMGGKPRRKNPQEGLYNELQKDKMAEAYSEIGMKGERRRGKGHDGLYQGLSTATKDTYDALHMQALPPR

SEQ ID NO: 488 - protein, 21 aa, Homo sapiens
NQLYNELNLGRREEYDVLDKR

SEQ ID NO: 489 - protein, 22 aa, Homo sapiens
EGLYNELQKDKMAEAYSEIGMK

SEQ ID NO: 490 - protein, 21 aa, Homo sapiens
DGLYQGLSTATKDTYDALHMQ

SEQ ID NO: 491 - protein, 112 aa, Homo sapiens; identical to SEQ ID NO: 476

SEQ ID NO: 492 - protein, 112 aa, Homo sapiens; identical to SEQ ID NO: 419

SEQ ID NO: 493 - protein, 110 aa, Homo sapiens
RVKFSRSADAPAYQQGQNQLYNELNLGRREEYDVLDKRRGRDPEMGGKPRRKNPQEGLYNELQKDKMAEAYSEIGMKGERRRGKGHDGLYQGLSTATKDTYDALHMQALP

SEQ ID NO: 494 - protein, 137 aa, Homo sapiens
DPKLCYLLDGILFIYGVILTALFLRVKFSRSADAPAYQQGQNQLYNELNLGRREEYDVLDKRRGRDPEMGGKPQRRKNPQEGLYNELQKDKMAEAYSEIGMKGERRRGKGHDGLYQGLSTATKDTYDALHMQALPPR

SEQ ID NO: 495 - protein, 163 aa, Homo sapiens; identical to SEQ ID NO: 472

SEQ ID NO: 496 - protein, 38 aa, Homo sapiens
RSRDQRLPPDAHKPPGGGSFRTPIQEEQADAHSTLAKI

SEQ ID NO: 497 - protein, 226 aa, Homo sapiens
MPGGPGVLQALPATIFLLFLLSAVYLGPGCQALWMHKVPASLMVSLGEDAHFQCPHNSSNNANVTWWRVLHGNYTWPPEFLGPGEDPNGTLIIQNVNKSHGGIYVCRVQEGNESYQQSCGTYLRVRQPPPRPFLDMGEGTKNRIITAEGIILLFCAVVPGTLLLFRKRWQNEKLGLDAGDEYEDENLYEGLNLDDCSMYEDISRGLQGTYQDVGSLNIGDVQLEKP

SEQ ID NO: 498 - protein, 188 aa, Homo sapiens
MPGGPGVLQALPATIFLLFLLSAVYLGPGCQALWMHKVPASLMVSLGEDAHFQCPHNSSNNANVTWWRVLHGNYTWPPEFLGPGEDPNEPPPRPFLDMGEGTKNRIITAEGIILLFCAVVPGTLLLFRKRWQNEKLGLDAGDEYEDENLYEGLNLDDCSMYEDISRGLQGTYQDVGSLNIGDVQLEKP

SEQ ID NO: 499 - protein, 226 aa, Homo sapiens; identical to SEQ ID NO: 497

SEQ ID NO: 500 - protein, 21 aa, Homo sapiens
ENLYEGLNLDDCSMYEDISRG

SEQ ID NO: 501 - protein, 84 aa, Homo sapiens
FVPVFLPAKPTTTPAPRPPTPAPTIASQPLSLRPEACRPAAGGAVHTRGLDFACDIYIWAPLAGTCGVLLLSLVITLYCNHRNR

SEQ ID NO: 502 - protein, 84 aa, Homo sapiens
FVPVFLPAKPITTPAPRPPTPAPTIASQPLSLRPEACRPAAGGAVHTRGLDFACDIYIWAPLAGTCGVLLLSLVITLYCNHRNR

SEQ ID NO: 503 - protein, 47 aa, Homo sapiens
PTTTPAPRPPTPAPTIASQPLSLRPEACRPAAGGAVHTRGLDFACDI

SEQ ID NO: 504 - protein, 41 aa, Homo sapiens
AVSLSKMLKKRSPLTTGVFVKMAPTEAECEKQFQPYFIPIN

SEQ ID NO: 505 - protein, 47 aa, Homo sapiens
AVSLSKMLKKRSPLTTGVYMNMTPRRPECEKQFQPYAPPRDFAAYRS

SEQ ID NO: 506 - protein, 20 aa, Homo sapiens
RPRRSPAQDGKVYINMPGRG

SEQ ID NO: 507 - protein, 113 aa, Homo sapiens
MGGLEPCSRLLLLPLLLAVSGLRPVQAQAQSDCSCSTVSPGVLAGIVMGDLVLTVLIALAVYFLGRLVPRGRGAAEAATRKQRITETESPYQELQGQRSDVYSDLNTQRPYYK

SEQ ID NO: 508 - protein, 112 aa, Homo sapiens
MGGLEPCSRLLLLPLLLAVSGLRPVQAQAQSDCSCSTVSPGVLAGIVMGDLVLTVLIALAVYFLGRLVPRGRGAAEATRKQRITETESPYQELQGQRSDVYSDLNTQRPYYK

SEQ ID NO: 509 - protein, 102 aa, Homo sapiens
MGGLEPCSRLLLLPLLLAVSDCSCSTVSPGVLAGIVMGDLVLTVLIALAVYFLGRLVPRGRGAAEAATRKQRITETESPYQELQGQRSDVYSDLNTQRPYYK

SEQ ID NO: 510 - protein, 101 aa, Homo sapiens
MGGLEPCSRLLLLPLLLAVSDCSCSTVSPGVLAGIVMGDLVLTVLIALAVYFLGRLVPRGRGAAEATRKQRITETESPYQELQGQRSDVYSDLNTQRPYYK

SEQ ID NO: 511 - protein, 113 aa, Homo sapiens; identical to SEQ ID NO: 507

SEQ ID NO: 512 - protein, 112 aa, Homo sapiens; identical to SEQ ID NO: 508

SEQ ID NO: 513 - protein, 102 aa, Homo sapiens; identical to SEQ ID NO: 509

SEQ ID NO: 514 - protein, 101 aa, Homo sapiens; identical to SEQ ID NO: 510

SEQ ID NO: 515 - protein, 21 aa, Homo sapiens
ESPYQELQGQRSDVYSDLNTQ

SEQ ID NO: 516 - protein, 21 aa, Homo sapiens
ESPYQELQGQRSDVYSDLNTQ

SEQ ID NO: 517 - protein, 49 aa, Homo sapiens
RSQCMWPRETQLLLEVPPSTEDARSCQFPEEERGERSAEEKGRLGDLWV

SEQ ID NO: 518 - protein, 35 aa, Homo sapiens
TKKKYSSSVHDPNGEFMFMRAVNTAKKSRLTDVTL

SEQ ID NO: 519 - protein, 39 aa, Homo sapiens
KSRQTPPLASVEMEAMEALPVTWGTSSRDEDLENCSHHL

SEQ ID NO: 520 - protein, 149 aa, Homo sapiens
RRDQRLPPDAHKPPGGGSFRTPIQEEQADAHSTLAKIRVKFSRSADAPAYQQGQNQLYNELNLGRREEYDVLDKRRGRDPEMGGKPRRKNPQEGLYNELQKDKMAEAYSEIGMKGERRRGKGHDGLYQGLSTATKDTYDALHMQALPPR

SEQ ID NO: 521 - protein, 619 aa, Homo sapiens
MPDPAAHLPFFYGSISRAEAEEHLKLAGMADGLFLLRQCLRSLGGYVLSLVHDVRFHHFPIERQLNGTYAIAGGKAHCGPAELCEFYSRDPDGLPCNLRKPCNRPSGLEPQPGVFDCLRDAMVRDYVRQTWKLEGEALEQAIISQAPQVEKLIATTAHERMPWYHSSLTREEAERKLYSGAQTDGKFLLRPRKEQGTYALSLIYGKTVYHYLISQDKAGKYCIPEGTKFDTLWQLVEYLKLKADGLIYCLKEACPNSSASNASGAAAPTLPAHPSTLTHPQRRIDTLNSDGYTPEPARITSPDKPRPMPMDTSVYESPYSDPEELKDKKLFLKRDNLLIADIELGCGNFGSVRQGVYRMRKKQIDVAIKVLKQGTEKADTEEMMREAQIMHQLDNPYIVRLIGVCQAEALMLVMEMAGGGPLHKFLVGKREEIPVSNVAELLHQVSMGMKYLEEKNFVHRDLAARNVLLVNRHYAKISDFGLSKALGADDSYYTARSAGKWPLKWYAPECINFRKFSSRSDVWSYGVTMWEALSYGQKPYKKMKGPEVMAFIEQGKRMECPPECPPELYALMSDCWIYKWEDRPDFLTVEQRMRACYYSLASKVEGPPGSTQKAEAACA

SEQ ID NO: 522 - protein, 180 aa, Homo sapiens
MLRLLLALNLFPSIQVTGNKILVKQSPMLVAYDNAVNLSCKYSYNLFSREFRASLHKGLDSAVEVCVVYGNYSQQLQVYSKTGFNCDGKLGNESVTFYLQNLYVNQTDIYFCKIEVMYPPPYLDNEKSNGTIIHVKGKHLCPSPLFPGPSKPFWVLVVVGGVLACYSLLVTVAFIIFWVR

SEQ ID NO: 523 - protein, 240 aa, Homo sapiens
MGNSCYNIVATLLLVLNFERTRSLQDPCSNCPAGTFCDNNRNQICSPCPPNSFSSAGGQRTCDICRQCKGVFRTRKECSSTSNAECDCTPGFHCLGAGCSMCEQDCKQGQELTKKGCKDCCFGTFNDQKRGICRPWTNCSLDGKSVLVNGTKERDVVCGPSPADLSPGASSVTPPAPAREPGHSPQIISFFLALTSTALLFLLFFLTLRFSVVKRGRKKLLYIFKQPFMRPVQTTQEEDG

SEQ ID NO: 524 - protein, 86 aa, Homo sapiens
MIPAVVLLLLLLVEQAAALGEPQLCYILDAILFLYGIVLTLLYCRLKIQVRKAAITSYEKSDGVYTGLSTRNQETYETLKHEKPPQ

SEQ ID NO: 525 - protein, 21 aa, Homo sapiens
DGVYTGLSTRNQETYETLKHE

SEQ ID NO: 526 - protein, 66 aa, Homo sapiens
DPKLCYILDAILFLYGIVLTLLYCRLKIQVRKAAITSYEKSDGVYTGLSTRNQETYETLKHEKPPQ

SEQ ID NO: 527 - protein, 21 aa, Homo sapiens
DGVYTGLSTRNQETYETLKHE

SEQ ID NO: 528 - protein, 46 aa, Homo sapiens
TTTPAPRPPTPAPTIASQPLSLRPEACRPAAGGAVHTRGLDFACDI

SEQ ID NO: 529 - protein, 31 aa, Homo sapiens
IISFFLALTSTALLFLLFFLTLRFSVVKRGR

SEQ ID NO: 530 - protein, 27 aa, Homo sapiens
IISFFLALTSTALLFLLFFLTLRFSVV

SEQ ID NO: 531 - protein, 26 aa, Homo sapiens
VAAILGLGLVLGLLGPLAILLALYLL

SEQ ID NO: 532 - protein, 363 aa, Homo sapiens
AVFGCIFGALVIVTVGGFIFWRKKRKDAKNNEVSFSQIKPKKSKLIRVENFEAYFKKQQADSNCGFAEEYEDLKLVGISQPKYAAELAENRGKNRYNNVLPYDISRVKLSVQTHSTDDYINANYMPGYHSKKDFIATQGPLPNTLKDFWRMVWEKNVYAIIMLTKCVEQGRTKCEEYWPSKQAQDYGDITVAMTSEIVLPEVVTIRDFTVKNIQTSESHPLRQFHFTSWPDHGVPDTTDLLINFRYLVRDYMKQSPPESPILVHCSAGVGRTGTFIAIDRLIYQIENENTVDVYGIVYDLRMHRPLMVQTEDQYVFLNQCVLDIVRSQKDSKVDLIYQNTTAMTIYENLAPVTTFGKTNGYIA

SEQ ID NO: 533 - protein, 21 aa, Homo sapiens
AVFGCIFGALVIVTVGGFIFW

SEQ ID NO: 534 - protein, 185 aa, Homo sapiens
KEITNALETWGALGQDINLDIPSFQMSDDIDDIKWEKTSDKKKIAQFRKEKETFKEKDTYKLFKNGTLKIKHLKTDDQDIYKVSIYDTKGKNVLEKIFDLKIQERVSKPKISWTCINTTLTCEVMNGTDPELNLYQDGKHLKLSQRVITHKWTTSLSAKFKCTAGNKVSKESSVEPVSCPEKGLD

SEQ ID NO: 535 - protein, 106 aa, Homo sapiens
IEVMYPPPYLDNEKSNGTITHVKGKHLCPSPLFPGPSKPFWVLVVVGGVLACYSLLVTVAHIFWVRSKRSRLLHSDYMNMTPRRPGPTRKHYQPYAPPRDFAAYRS

SEQ ID NO: 536 - protein, 27 aa, Homo sapiens
FWVLVVVGGVLACYSLLVTVAFIIFWV

SEQ ID NO: 537 - protein, 66 aa, Homo sapiens
IEVMYPPPYLDNEKSNGTIIHVKGKHLCPSPLFPGPSKPFWVLVVVGGVLACYSLLVTVAFIIFWV

SEQ ID NO: 538 - protein, 33 aa, Homo sapiens
IFWVLVVVGGVLACYSLLVTVAFIIFWVRSKRR

SEQ ID NO: 539 - protein, 68 aa, Homo sapiens; identical to SEQ ID NO: 449

SEQ ID NO: 540 - protein, 28 aa, Homo sapiens
MFWVLVVVGGVLACYSLLVTVAFIIFWV

SEQ ID NO: 541 - protein, 26 aa, Homo sapiens
FWVLVVVGGVLACYSLLVTVAFHFWV

SEQ ID NO: 542 - protein, 28 aa, Homo sapiens
MFWVLVVVGGVLACYSGGVTVAFIIFWV

SEQ ID NO: 543 - protein, 26 aa, Homo sapiens
WVLVVVGGVLACYSLLVTVAFIIFWV

SEQ ID NO: 544 - protein, 69 aa, Homo sapiens
PFWVLVVVGGVLACYSLLVTVAFIIFWVRSKRSRLLHSDYMNMTPRRPGPTRKHYQPYAPPRDFAAYRS

SEQ ID NO: 545 - protein, 180 aa, Homo sapiens
FWVLVVVGGVLACYSLLVTVAFIIFWVRSKRSRLLHSDYMNMTPRRPGPTRKHYQPYAPPRDFAAYRSRVKFSRSADAPAYQQGQNQLYNELNLGRREEYDVLDKRRGRDPEMGGKPRRKNPQEGLYNELQKDKMAEAYSEIGMKGERRRGKGHDGLYQGLSTATKDTYDALHMQALPPR

SEQ ID NO: 546 - protein, 216 aa, Homo sapiens
FWVLVVVGGVLACYSLLVTVAFIIFWVRSKRSRLLHSDYMNMTPRRPGPTRKHYQPYAPPRDFAAYRSRDQRLPPDAHKPPGGGSFRTPIQEEQADAHSTLAKIRVKFSRSADAPAYQQGQNQLYNELNLGRREEYDVLDKRRGRDPEMGGKPRRKNPQEGLYNELQKDKMAEAYSEIGMKGERRRGKGHDGLYQGLSTATKDTYDALHMQALPPR

SEQ ID NO: 547 - protein, 140 aa, Homo sapiens
FWVLVVVGGVLACYSLLVTVAFIIFWVRRVKFSRSADAPAYQQGQNQLYNELNLGRREEYDVLDKRRGRDPEMGGKPRRKNPQEGLYNELQKDKMAEAYSEIGMKGERRRGKGHDGLYQGLSTATKDTYDALHMQALPPR

SEQ ID NO: 548 - protein, 222 aa, Homo sapiens; identical to SEQ ID NO: 454

SEQ ID NO: 549 - protein, 23 aa, Homo sapiens
LCYLLDGILFIYGVILTALFLRV

SEQ ID NO: 550 - protein, 51 aa, Homo sapiens
MKWKALFTAAILQAQLPITEAQSFGLLDPKLCYLLDGILFIYGVILTALFL

SEQ ID NO: 551 - protein, 21 aa, Homo sapiens
LCYLLDGILFIYGVILTALFL

SEQ ID NO: 552 - protein, 25 aa, Homo sapiens
ALIVLGGVAGLLLFIGLGIFFCVRC

SEQ ID NO: 553 - protein, 22 aa, Homo sapiens
MALIVLGGVAGLLLFIGLGIFF

SEQ ID NO: 554 - protein, 725 aa, Homo sapiens
ALIAFLAFLIIVTSIALLVVLYKIYDLHKKRSCNLDEQQELVERDDEKQLMNVEPIHADILLETYKRKIADEGRLFLAEFQSIPRVFSKFPIKEARKPFNQNKNRYVDILPYDYNRVELSEINGDAGSNYINASYIDGFKEPRKYIAAQGPRDETVDDFWRMIWEQKATVIVMVTRCEEGNRNKCAEYWPSMEEGTRAFGDVVVKINQHKRCPDYIIQKLNIVNKKEKATGREVTHIQFTSWPDHGVPEDPHLLLKLRRRVNAFSNFFSGPIWHCSAGVGRTGTYIGIDAMLEGLEAENKVDVYGYVVKLRRQRCLMVQVEAQYILIHQALVEYNQFGETEVNLSELHPYLHNMKKRDPPSEPSPLEAEFQRLPSYRSWRTQHIGNQEENKSKNRNSNVIPYDYNRVPLKHELEMSKESEHDSDESSDDDSDSEEPSKYINASFIMSYWKPEVMIAAQGPLKETIGDFWQMIFQRKVKVIVMLTELKHGDQEICAQYWGEGKQTYGDIEVDLKDTDKSSTYTLRVFELRHSKRKDSRTVYQYQYTNWSVEQLPAEPKELISMIQWKQKLPQKNSSEGNKHHKSTPLLIHCRDGSQQTGIFCALLNLLESAETEEWDIFQWKALRKARPGMVSTFEQYQFLYDVIASTYPAQNGQVKKNNHQEDKIEFDNEVDKVKQDANCVNPLGAPEKLPEAKEQAEGSEPTSGTEGPEHSVNGPASPALNQGS

SEQ ID NO: 555 - protein, 23 aa, Homo sapiens
PLFIPVAVMVTAFSGLAFIIWLA

SEQ ID NO: 556 - protein, 24 aa, Homo sapiens
ALPAALAVISFLLGLGLGVACVLA

SEQ ID NO: 557 - protein, 21 aa, Homo sapiens
MALPVTALLLPLALLLHAARP

SEQ ID NO: 558 - protein, 286 aa, Homo sapiens
AAAFVPVFLPAKPTTTPAPRPPTPAPTIASQPLSLRPEACRPAAGGAVHTRGLDFACDIYIWAPLAGTCGVLLLSLVITLYCNHRNRSKRSRLLHSDYMNMTPRRPGPTRKHYQPYAPPRDFAAYRSRFSVVKRGRKKLLYIFKQPFMRPVQTTQEEDGCSCRFPEEEEGGCELRVKFSRSADAPAYQQGQNQLYNELNLGRREEYDVLDKRRGRDPEMGGKPRRKNPQEGLYNELQKDKMAEAYSEIGMKGERRRGKGHDGLYQGLSTATKDTYDALHMQALPPR

SEQ ID NO: 559 - protein, 226 aa, Homo sapiens
AAATTTPAPRPPTPAPTIASQPLSLRPEACRPAAGGAVHTRGLDFACDIYIWAPLAGTCGVLLLSLVITLYCKRGRKKLLYIFKQPFMRPVQTTQEEDGCSCRFPEEEEGGCELRVKFSRSADAPAYKQGQNQLYNELNLGRREEYDVLDKRRGRDPEMGGKPRRKNPQEGLYNELQKDKMAEAYSEIGMKGERRRGKGHDGLYQGLSTATKDTYDALHMQALPPR

SEQ ID NO: 560 - protein, 83 aa, Homo sapiens
FVPVFLPAKPTTTPAPRPPTPAPTIASQPLSLRPEACRPAAGGAVHTRGLDFACDIYIWAPLAGTCGVLLLSLVITLYCNHRN

SEQ ID NO: 561 - protein, 22 aa, Homo sapiens
IWAPLAGTCGVLLLSLVITLYC

SEQ ID NO: 562 - protein, 24 aa, Homo sapiens
IYIWAPLAGTCGVLLLSLVITLYC

SEQ ID NO: 563 - protein, 25 aa, Homo sapiens
IYIWAPLAGTCGVLLLSLVITLYCR

SEQ ID NO: 564 - protein, 71 aa, Homo sapiens
PTTTPAPRPPTPAPTIASQPLSLRPEACRPAAGGAVHTRGLDFACDIYIWAPLAGTCGVLLLSLVITLYCN

SEQ ID NO: 565 - protein, 25 aa, Homo sapiens
IYIWAPLAGTCGVLLLSLVITLVCR

SEQ ID NO: 566 - protein, 21 aa, Homo sapiens
IYIWAPLAGTCGVLLLSLVIT

SEQ ID NO: 567 - protein, 23 aa, Homo sapiens
IYIWAPLAGTCGVLLLSLVITLY

SEQ ID NO: 568 - protein, 101 aa, Homo sapiens
APVGLVARLADESGHVVLRWLPPPETPMTSHIRYEVDVSAGNGAGSVQRVEILEGRTECVLSNLRGRTRYTFAVRARMAEPSFGGFWSAWSEPVSLLTPSD

SEQ ID NO: 569 - protein, 52 aa, Homo sapiens
FFIPLLVVILFAVDTGLFISTQQQVTFLLKIKRTRKGFRLLNPHPKPNPKNN

SEQ ID NO: 570 - protein, 257 aa, Homo sapiens
MAPAMESPTLLCVALLFFAPDGVLAVPQKPKVSLNPPWNRIFKGENVTLTCNGNNFFEVSSTKWFHNGSLSEETNSSLNIVNAKFEDSGEYKCQHQQVNESEPVYLEVFSDWLLLQASAEVVMEGQPLFLRCHGWRNWDVYKVIYYKDGEALKYWYENHNISITNATVEDSGTYYCTGKVWQLDYESEPLNITVIKAPREKYWLQFFIPLLVVILFAVDTGLFISTQQQVTFLLKIKRTRKGFRLLNPHPKPNPKNN

SEQ ID NO: 571 - protein, 244 aa, Homo sapiens
MDTESNRRANLALPQEPSSVPAFEVLEISPQEVSSGRLLKSASSPPLHTWLTVLKKEQEFLGVTQILTAMICLCFGTVVCSVLDISHIEGDIFSSFKAGYPFWGAIFFSISGMLSIISERRNATYLVRGSLGANTASSIAGGTGITILIINLKKSLAYIHIHSCQKFFETKCFMASFSTEIVVMMLFLTILGLGSAVSLTICGAGEELKGNKVPEDRVYEELNIYSATYSELEDPGEMSPPIDL

SEQ ID NO: 572 - protein, 86 aa, Homo sapiens; identical to SEQ ID NO: 524

SEQ ID NO: 573 - protein, 54 aa, Homo sapiens
DIFIPLLVVILFAVDTGLFISTQQQVTFLLKIKRTRKGFRLLNPHPKPNPKNNR

SEQ ID NO: 574 - protein, 31 aa, Homo sapiens
PLGWLTVVLLAVAACVLLLTSAQLGLHIWQL

SEQ ID NO: 575 - protein, 24 aa, Homo sapiens
SIISAVVGILLVVVLGVVFGILII

SEQ ID NO: 576 - protein, 113 aa, Homo sapiens
CHPECQPQNGSVTCFGPEADQCVACAHYKDPPFCVARCPSGVKPDLSYMPIWKFPDEEGACQPCPINCTHSCVDLDDKGCPAEQRASPLTSIISAVVGILLVVVLGVVFGILI

SEQ ID NO: 577 - protein, 21 aa, Homo sapiens
FLVIIVILSALFLGTLACFCV

SEQ ID NO: 578 - protein, 68 aa, Homo sapiens
FWVLVVVGGVLACYSLLVTVAFIIFWVRSKRSRLLHSDYMNMTPRRPGPTRKHYQAYAAARDFAAYRS

SEQ ID NO: 579 - protein, 106 aa, Homo sapiens
IEVMYPPPYLDNEKSNGTIIHVKGKHLCPSPLFPGPSKPFWVLWVGGVLACYSLLVTVAFIIFWVRSKRSRLLHSDYMNMTPRRPGPTRKHYQPYAPPRDFAAYRS

SEQ ID NO: 580 - protein, 28 aa, Homo sapiens
FWVLVVVGGVLACYSLLVTVAFIIFWVR

SEQ ID NO: 581 - protein, 73 aa, Homo sapiens
TPAPRPPTPAPTIASQPLSLRPEACRPAAGGAWTRGLDFACDIYIWAPLAGTCGVLLLSLVITLYCNHRNRRR

SEQ ID NO: 582 - protein, 23 aa, Homo sapiens
LGLLVAGVLVLLVSLGVAIHLCC

SEQ ID NO: 583 - protein, 27 aa, Homo sapiens
ILLAGLVAADAVASLLIVGAVFLCARR

SEQ ID NO: 584 - protein, 21 aa, Homo sapiens
FWLPIGCAAFVVVCILGCILI

SEQ ID NO: 585 - protein, 233 aa, Homo sapiens
EPKSPDKTHTCPPCPAPPVAGPSVFLFPPKPKDTLMIARTPEVTCVVVDVSHEDPEVKFNWYVDGVEVHNAKTKPREEQYNSTYRVVSVLTVLHQDWLNGKEYKCKVSNKALPAPIEKTISKAKGQPREPQVYTLPPSRDELTKNQVSLTCLVKGFYPSDIAVEWESNGQPENNYKTTPPVLDSDGSFFLYSKLTVDKSRWQQGNVFSCSVMHEALHNHYTQKSLSLSPGKKD

SEQ ID NO: 586 - protein, 21 aa, Homo sapiens
LLFLILGVLSLLLLVTGAFGF

SEQ ID NO: 587 - protein, 21 aa, Homo sapiens
VAAILGLGLVLGLLGPLAILL

SEQ ID NO: 588 - protein, 20 aa, Homo sapiens
VGWGGLLGSLVLLVWVLAVI

SEQ ID NO: 589 - protein, 27 aa, Homo sapiens
FWALVVVAGVLFCYGLLVTVALCVIWT

SEQ ID NO: 590 - protein, 5 aa, Homo sapiens
DKTHT

SEQ ID NO: 591 - protein, 4 aa, Homo sapiens
CPPC

SEQ ID NO: 592 - protein, 15 aa, Homo sapiens
CPEPKSCDTPPPCPR

SEQ ID NO: 593 - protein, 12 aa, Homo sapiens
ELKTPLGDTTHT

SEQ ID NO: 594 - protein, 10 aa, Homo sapiens
KSCDKTHTCP

SEQ ID NO: 595 - protein, 7 aa, Homo sapiens
KCCVDCP

SEQ ID NO: 596 - protein, 7 aa, Homo sapiens
KYGPPCP

SEQ ID NO: 597 - protein, 16 aa, Homo sapiens
VEPKSPDKTHTCPPCP

SEQ ID NO: 598 - protein, 16 aa, Homo sapiens
LDPKSSDKTHTCPPCP

SEQ ID NO: 599 - protein, 39 aa, Homo sapiens
IEVMYPPPYLDNEKSNGTIIHVKGKHLCPSPLFPGPSKP

SEQ ID NO: 600 - protein, 12 aa, Homo sapiens
GGAVHTRGLDFA

SEQ ID NO: 601 - protein, 45 aa, Homo sapiens
TTTPAPRPPTPAPTIASQPLSLRPEACRPAAGGAVHTRGLDFACD

SEQ ID NO: 602 - protein, 48 aa, Homo sapiens
AKPTTTPAPRPPTPAPTIASQPLSLRPEACRPAAGGAVHTRGLDFACD

SEQ ID NO: 603 - protein, 45 aa, Homo sapiens; identical to SEQ ID NO: 601

SEQ ID NO: 604 - protein, 45 aa, Homo sapiens; identical to SEQ ID NO: 601

SEQ ID NO: 605 - protein, 79 aa, Homo sapiens
TTTPAPRPPTPAPTIASQPLSLRPEACRPAAGGAVHTRGLDFACDEPKSPDKTHTCPPCPAPPVAGPSVFLFPPKPKDT

SEQ ID NO: 606 - protein, 51 aa, Homo sapiens
PAKPTTTPAPRPPTPAPTIASQPLSLRPEACRPAAGGAVHTRGLDFACDIY

SEQ ID NO: 607 - protein, 69 aa, Homo sapiens
TTTPAPRPPTPAPTIASQPLSLRPEACRPAAGGAVHTRGLDFACDIYIWAPLAGTCGVLLLSLVITLYC

SEQ ID NO: 608 - protein, 44 aa, Homo sapiens
TTPAPRPPTPAPTIASQPLSLRPEACRPAAGGAVHTRGLDFACD

SEQ ID NO: 609 - protein, 47 aa, Homo sapiens
TTTPAPRPPTPAPTIASQPLSLRPEACRPAAGGAVHTRGLDFACDIY

SEQ ID NO: 610 - protein, 11 aa, Homo sapiens
LDKTHTCPPCP

SEQ ID NO: 611 - protein, 101 aa, Homo sapiens; identical to SEQ ID NO: 568

SEQ ID NO: 612 - protein, 16 aa, Homo sapiens
GLAVSTISSFFPPGYQ

SEQ ID NO: 613 - protein, 16 aa, Homo sapiens
GLAVSTISSFFPPGYQ

SEQ ID NO: 614 - protein, 282 aa, Homo sapiens
RWPESPKAQASSVPTAQPQAEGSLAKATTAPATTRNTGRGGEEKKKEKEKEEQEERETKTPECPSHTQPLGVYLLTPAVQDLWLRDKATFTCFVVGSDLKDAHLTWEVAGKVPTGGVEEGLLERHSNGSQSQHSRLTLPRSLWNAGTSVTCTLNHPSLPPQRLMALREPAAQAPVKLSLNLLASSDPPEAASWLLCEVSGFSPPNILLMWLEDQREVNTSGFAPARPPPQPGSTTFWAWSVLRVPAPPSPQPATYTCVVSHEDSRTLLNASRSLEVSYVTDH

SEQ ID NO: 615 - protein, 246 aa, Homo sapiens
YVTVSSQDPAEPKSPDKTHTCPPCPAPELLGGPSVFLFPPKPKDTLMISRTPEVTCVVVDVSHEDPEVKFNWYVDGVEVHNAKTKPREEQYNSTYRVVSVLTVLHQDWLNGKEYKCKVSNKALPAPIEKTISKAKGQPREPQVYTLPPSRDELTKNQVSLTCLVKGFYPSDIAVEWESNGQPENNYKTTPPVLDSDGSFFLYSKLTVDKSRWQQGNVFSCSVMHEALHNHYTQKSLSLSPGKKDPK

SEQ ID NO: 616 - protein, 45 aa, Homo sapiens
KPTTTPAPRPPTPAPTIASQPLSLRPEACRPAAGGAVHTRGLDFA

SEQ ID NO: 617 - protein, 16 aa, Homo sapiens
LEPKSCDKTHTCPPCP

SEQ ID NO: 618 - protein, 43 aa, Homo sapiens
KPTTTPAPRPPTPAPTIASQPLSLRPEACRPAAGGAVHTRGLD

SEQ ID NO: 619 - protein, 15 aa, Homo sapiens
EPKSCDKTHTCPPCP

SEQ ID NO: 620 - protein, 16 aa, Homo sapiens
ELKTPLGDTHTCPRCP

SEQ ID NO: 621 - protein, 15 aa, Homo sapiens
EPKSCDTPPPCPRCP

SEQ ID NO: 622 - protein, 12 aa, Homo sapiens
ESKYGPPCPSCP

SEQ ID NO: 623 - protein, 12 aa, Homo sapiens
ERKCCVECPPCP

SEQ ID NO: 624 - protein, 229 aa, Homo sapiens
ESKYGPPCPPCPAPEFLGGPSVFLFPPKPKDTLMISRTPEVTCVVVDVSQEDPEVQFNWYVDGVEVHNAKTKPREEQFNSTYRVVSVLTVLHQDWLNGKEYKCKVSNKGLPSSIEKTISKAKGQPREPQVYTLPPSQEEMTKNQVSLTCLVKGFYPSDIAVEWESNGQPENNYKTTPPVLDSDGSFFLYSRLTVDKSRWQEGNVFSCSVMHEALHNHYTQKSLSLSLGK

SEQ ID NO: 625 - protein, 119 aa, Homo sapiens
ESKYGPPCPPCPGQPREPQVYTLPPSQEEMTKNQVSLTCLVKGFYPSDIAVEWESNGQPENNYKTTPPVLDSDGSFFLYSRLTVDKSRWQEGNVFSCSVMHEALHNHYTQKSLSLSLGK

SEQ ID NO: 626 - protein, 282 aa, Homo sapiens; identical to SEQ ID NO: 614

SEQ ID NO: 627 - protein, 281 aa, Homo sapiens
RWPESPKAQASSVPTAQPQAEGSLAKATTAPATTRNTGRGGEEKKKEKEKEEQEERETKTPECPSHTQPLGVYLLTPAVQDLWLRDKATFTCFVVGSDLKDAHLTWEVAGKVPTGGVEEGLLERHSNGSQSQHSRLTLPRSLWNAGTSVTCTLHPSLPPQRLMALREPAAQAPVKLSLNLLASSDPPEAASWLLCEVSGFSPPNILLMWLEDQREVNTSGFAPARPPPQPGSTTFWAWSVLRVPAPPSPQPATYTCVVSHEDSRTLLNASRSLEVSYVTDH

SEQ ID NO: 628 - protein, 283 aa, Homo sapiens
RWPESPKAQASSVPTAQPQAEGSLAKATTAPATTRNTGRGGEEKKKEKEKEEQEERETKTPECPSHTQPLGVYLLTPAVQDLWLRDKATFTCFVVGSDLKDAHLTWEVAGKVPTGGVEEGLLERHSNGSQSQHSRLTLPRSLWNAGTSVTCTLNHPSLPPQRLMALREPAAQAPVKLSLNLLASSDPPEAASWLLCEVSGFSPPNILLMVVLEDQREVNTSGFAPARPPPQPGSTTFWAWSVLRVPAPPSPQPATYTCVVSHEDSRTLLNASRSLEVSYVTDH

SEQ ID NO: 629 - protein, 58 aa, Homo sapiens
ESPKAQASSVPTAQPQAEGSLAKATTAPATTRNTGRGGEEKKKEKEKEEQEERETKTP

SEQ ID NO: 630 - protein, 282 aa, Homo sapiens; identical to SEQ ID NO: 614

SEQ ID NO: 631 - protein, 282 aa, Homo sapiens; identical to SEQ ID NO: 614

SEQ ID NO: 632 - protein, 282 aa, Homo sapiens; identical to SEQ ID NO: 614

SEQ ID NO: 633 - protein, 282 aa, Homo sapiens; identical to SEQ ID NO: 614

SEQ ID NO: 634 - protein, 234 aa, Homo sapiens
  MOD_RES 91: note = Selenocysteine
AEPKSPDKTHTCPPCPAPPVAGPSVFLFPPKPKDTLMIARTPEVTCVVVDVSHEDPEVKFNWYVDGVEVHNAKTKPREEQYNSTYRVVSVXTVLHQDWLNGKEYKCKVSNKALPAPIEKTISKAKGQPREPQVYTLPPSRDELTKNQVSLTCLVKGFYPSDIAVEWESNGQPENNYKTTPPVLDSDGSFFLYSKLTVDKSRWQQGNVFSCSVMHEALHNHYTQKSLSLSPGKKD

SEQ ID NO: 635 - protein, 234 aa, Homo sapiens
AEPKSPDKTHTCPPCPAPPVAGPSVFLFPPKPKDTLMIARTPEVTCVVVDVSHEDPEVKFNWYVDGVEVHNAKTKPREEQYNSTYRVVSVLTVLHQDWLNGKEYKCKVSNKALPAPIEKTISKAKGQPREPQVYTLPPSRDELTKNQVSLTCLVKGFYPSDIAVEWESNGQPENNYKTTPPVLDSDGSFFLYSKLTVDKSRWQQGNVFSCSVMHEALHNHYTQKSLSLSPGKKD

SEQ ID NO: 636 - protein, 20 aa, Homo sapiens
AEPKSPDKTHTCPPCPKDPK

SEQ ID NO: 637 - protein, 15 aa, Homo sapiens
EPKSCDKTHTCPPCP

SEQ ID NO: 638 - protein, 233 aa, Homo sapiens
EPKSPDKTHTCPPCPAPPVAGPSVFLFPPKPKDTLMIARTPEVTCVVVDVSHEDPEVKFNWYVDGVEVHNAKTKPREEQYNSTYRVVSVLTVLHQDWLNGKEVKCKVSNKALPAPIEKTISKAKGQPREPQVYTLPPSRDELTKNQVSLTCLVKGFYPSDIAVEWESNGQPENNYKTTPPVLDSDGSFFLVSKLTVDKSRWQQGNVFSCSVMHEALHNHYTQKSLSLSPGKKD

SEQ ID NO: 639 - protein, 13 aa, Homo sapiens
SVFLFPPKPKDTL

SEQ ID NO: 640 - protein, 231 aa, Homo sapiens
EPKSPDKTHTCPPCPAPPVAGPSVFLFPPKPKDTLMIARTPEVTCVVVDVSHEDPEVKFNWYVDGVEVHNAKTKPREEQYNSTYRVVSVLTVLHQDWLNGKEYKCKVSNKALPAPIEKTISKAKGQPREPQVYTLPPSRDELTKNQVSLTCLVKGFYPSDIAVEWESNGQPENNYKTTPPVLDSDGSFFLYSKLTVDKSRWQQGNVFSCSVMHEALHNHYTQKSLSLSPGK

SEQ ID NO: 641 - protein, 235 aa, Homo sapiens
EPKSPDKTHTCPPCPAPPVAGPSVFLFPPKPKDTLMIARTPEVTCVVVDVSHEDPEVKFNWYVDGVEVHNAKTKPREEQYNSTYRVVSVLTVLHQDWLNGKEYKCKVSNKALPAPIEKTISKAKGQPREPQVYTLPPSRDELTKNQVSLTCLVKGFYPSDIAVEWESNGQPENNYKTTPPVLDSDGSFFLYSKLTVDKSRWQQGNVFSCSVMHEALHNHYTQKSLSLSPGKKDPK

SEQ ID NO: 642 - protein, 223 aa, Homo sapiens
VECPPCPAPPVAGPSVFLFPPKPKDTLMISRTPEVTCVVVDVSHEDPEVKFNWYVDGVEVHNAKTKPREEQYNSTYRVVSVLTVLHQDWLNGKEYKCKVSNKGLPSSIEKTISKAKGQPREPQVYTLPPSREEMTKNQVSLTCLVKGFYPSDIAVEWESNGQPENNYKTTPPVLDSDGSFFLYSKLTVDKSRWQQGNVFSCSVMHEALHNHYTQKSLSLSPGK

SEQ ID NO: 643 - protein, 235 aa, Homo sapiens
DPAEPKSPDKTHTCPPCPAPPVAGPSVFLFPPKPKDTLMIARTPEVTCVVVDVSHEDPEVKFNWYVDGVEVHNAKTKPREEQYNSTYRVVSVLTVLHQDWLNGKEYKCKVSNKALPAPIEKTISKAKGQPREPQVYTLPPSRDELTKNQVSLTCLVKGFYPSDIAVEWESNGQPENNYKTTPPVLDSDGSFFLYSKLTVDKSRWQQGNVFSCSVMHEALHNHYTQKSLSLSPGKK

SEQ ID NO: 644 - protein, 12 aa, Homo sapiens
ERKCCVECPPCP

SEQ ID NO: 645 - protein, 17 aa, Homo sapiens
ELKTPLGDTTHTCPRCP

SEQ ID NO: 646 - protein, 61 aa, Homo sapiens
ELKTPLGDTHTCPRCPEPKSCDTPPPCPRCPEPKSCDTPPPCPRCPEPKSCDTPPPCPRCP

SEQ ID NO: 647 - protein, 230 aa, Homo sapiens
ESKYGPPCPPCPAPEFLGGPSVFLFPPKPKDTLMISRTPEVTCVVVDVSQEDPEVQFNWYVDGVEVHNAKTKPREEQFNSTYRVVSVLTVLHQDWLNGKEYKCKVSNKGLPSSIEKTISKAKGQPREPQVYTLPPSQEEMTKNQVSLTCLVKGFYPSDIAVEWESNGQPENNYKTTPPVLDSDGSFFLYSRLTVDKSRWQEGNVFSCSVMHEALHNHYTQKSLSLSLGKM

SEQ ID NO: 648 - protein, 230 aa, Homo sapiens
ESKYGPPCPPCPAPEFEGGPSVFLFPPKPKDTLMISRTPEVTCVVVDVSQEDPEVQFNWYVDGVEVHNAKTKPREEQFQSTYRVVSVLTVLHQDWLNGKEYKCKVSNKGLPSSIEKTISKAKGQPREPQVYTLPPSQEEMTKNQVSLTCLVKGFYPSDIAVEWESNGQPENNYKTTPPVLDSDGSFFLYSRLTVDKSRWQEGNVFSCSVMHEALHNHYTQKSLSLSLGKM

SEQ ID NO: 649 - protein, 12 aa, Homo sapiens
SPNMVPHAHHAQ

SEQ ID NO: 650 - protein, 107 aa, Homo sapiens
GQPREPQVYTLPPSQEEMTKNQVSLTCLVKGFYPSDIAVEWESNGQPENNYKTTPPVLDSDGSFFLYSRLTVDKSRWQEGNVFSCSVMHEALHNHYTQKSLSLSLGK

SEQ ID NO: 651 - protein, 129 aa, Homo sapiens
ESKYGPPCPPCPGGGSSGGGSGGQPREPQVYTLPPSQEEMTKNQVSLTCLVKGFYPSDIAVEWESNGQPENNYKTTPPVLDSDGSFFLYSRLTVDKSRWQEGNVFSCSVMHEALHNHYTQKSLSLSLGK

SEQ ID NO: 652 - protein, 229 aa, Homo sapiens
ESKYGPPCPSCPAPEFEGGPSVFLFPPKPKDTLMISRTPEVTCVVVDVSQEDPEVQFNWYVDGVEVHQAKTKPREEQFNSTYRVVSVLTVLHQDWLNGKEYKCKVSNKGLPSSIEKTISKAKGQPREPQVYTLPPSQEEMTKNQVSLTCLVKGFVPSDIAVEWESNGQPENNYKTTPPVLDSDGSFFLYSRLTVDKSRWQEGNVFSCSVMHEALHNHYTQKSLSLSLGK

SEQ ID NO: 653 - protein, 229 aa, Homo sapiens
ESKYGPPCPPCPAPEFEGGPSVFLFPPKPKDTLMISRTPEVTCVVVDVSQEDPEVQFNWYVDGVEVHQAKTKPREEQFNSTYRVVSVLTVLHQDWLNGKEYKCKVSNKGLPSSIEKTISKAKGQPREPQVYTLPPSQEEMTKNQVSLTCLVKGFVPSDIAVEWESNGQPENNYKTTPPVLDSDGSFFLYSRLTVDKSRWQEGNVFSCSVMHEALHNHYTQKSLSLSLGK

SEQ ID NO: 654 - protein, 230 aa, Homo sapiens; identical to SEQ ID NO: 647

SEQ ID NO: 655 - DNA, 36 bp, Homo sapiens
  source 1..36: mol_type = other DNA
gaatctaagtacggaccgccctgccccccttgccct

SEQ ID NO: 656 - protein, 12 aa, Homo sapiens
ESKYGPPCPPCP

SEQ ID NO: 657 - protein, 119 aa, Homo sapiens; identical to SEQ ID NO: 625

SEQ ID NO: 658 - protein, 229 aa, Homo sapiens; identical to SEQ ID NO: 624

SEQ ID NO: 659 - protein, 229 aa, Homo sapiens; identical to SEQ ID NO: 624

SEQ ID NO: 660 - protein, 12 aa, Homo sapiens
ESKYGPPCPPCP

SEQ ID NO: 661 - protein, 9 aa, Homo sapiens
YGPPCPPCP

SEQ ID NO: 662 - protein, 10 aa, Homo sapiens
KYGPPCPPCP

SEQ ID NO: 663 - protein, 13 aa, Homo sapiens
EVVKYGPPCPPCP

SEQ ID NO: 664 - protein, 229 aa, Homo sapiens
ESKYGPPCPSCPAPEFLGGPSVFLFPPKPKDTLMISRTPEVTCVVVDVSQEDPEVQFNWYVDGVEVHNAKTKPREEQFNSTYRVVSVLTVLHQDWLNGKEYKCKVSNKGLPSSIEKTISKAKGQPREPQVYTLPPSQEEMTKNQVSLTCLVKGFYPSDIAVEWESNGQPENNYKTTPPVLDSDGSFFLYSRLTVDLSRWQEGNVFSCSVMHEALHNHYTQKSLSLSLGK

SEQ ID NO: 665 - protein, 22 aa, Homo sapiens
ESKYGPPCPPCPGGGSSGGGSG

SEQ ID NO: 666 - protein, 231 aa, Homo sapiens
EPKSPDKTHTCPPCPAPPVAGPSVFLFPPKPKDTLMIARTPEVTCVVVDVSHEDPEVKFNWYVDGVEVHNAKTKPREEQYNSTYRVVSVLTVLHQDWLNGKEYKCKVSNKALPAPIEKTISKAKGQPREPQVYTLPPSRDELTKNQVSLTCLVKGFYPSDIAVEWESNGQPENNYKTIPPVLDSDGSFFLYSKLTVDKSRWQQGNVFSCSVMHEALHNHYTQKSLSLSPGK

SEQ ID NO: 667 - protein, 231 aa, Homo sapiens
EPKSPDKTHTCPPCPAPPVAGPSVFLFPPKPKDTLMIARTPEVTCVVVDVSHEDPEVKFNWYVDGVEVHNAKTKPREEQYNSTYRVVSVLTVLHQDWLNGKEYKCKVSNKALPAPLEKTISKAKGQPREPQVYTLPPSRDELTKNQVSLTCLVKGFYPSDIAVEWESNGQPENNYKTIPPVLDSDGSFFLYSKLTVDKSRWQQGNVFSCSVMHEALHNHYTQKSLSLSPGK

SEQ ID NO: 668 - protein, 231 aa, Homo sapiens; identical to SEQ ID NO: 640

SEQ ID NO: 669 - protein, 486 aa, synthetic construct
  REGION 1..486: note = Description of Artificial Sequence: Synthetic construct
MALPVTALLLPLALLLHAARPDIQMTQTTSSLSASLGDRVTISCRASQDISKYLNWYQQKPDGTVKLLIYHTSRLHSGVPSRFSGSGSGTDYSLTISNLEQEDIATYFCQQGNTLPYTFGGGTKLEITGGGGSGGGGSGGGGSEVKLQESGPGLVAPSQSLSVTCTVSGVSLPDYGVSWIRQPPRKGLEWLGVIWGSETTYYNSALKSRLTIIKDNSKSQVFLKMNSLQTDDTAIYYCAKHYYYGGSYAMDYWGQGTSVTVSSTTTPAPRPPTPAPTIASQPLSLRPEACRPAAGGAVHTRGLDFACDIYIWAPLAGTCGVLLLSLVITLYCKRGRKKLLYIFKQPFMRPVQTTQEEDGCSCRFPEEEEGGCELRVKFSRSADAPAYKQGQNQLYNELNLGRREEYDVLDKRRGRDPEMGGKPRRKNPQEGLYNELQKDKMAEAYSEIGMKGERRRGKGHDGLYQGLSTATKDTYDALHMQALPPR

SEQ ID NO: 670 - protein, 593 aa, synthetic construct
  REGION 1..593: note = Description of Artificial Sequence: Synthetic construct
MALPVTALLLPLALLLHAARPDIQMTQTTSSLSASLGDRVTISCRASQDISKYLNWYQQKPDGTVKLLIYHTSRLHSGVPSRFSGSGSGTDYSLTISNLEQEDIATYFCQQGNTLPYTFGGGTKLEITGGGGSGGGGSGGGGSEVKLQESGPGLVAPSQSLSVTCTVSGVSLPDYGVSWIRQPPRKGLEWLGVIWGSETTYYNSALKSRLTIIKDNSKSQVFLKMNSLQTDDTAIYYCAKHYYYGGSYAMDYWGQGTSVTVSSGVQVETISPGDGRTFPKRGQTCVVHYTGMLEDGKKVDSSRDRNKPFKFMLGKQEVIRGWEEGVAQMSVGQRAKLTISPDYAYGATGHPGIIPPHATLVFDVELLKPETTTPAPRPPTPAPTIASQPLSLRPEACRPAAGGAVHTRGLDFACDIYIWAPLAGTCGVLLLSLVITLYCKRGRKKLLYIFKQPFMRPVQTTQEEDGCSCRFPEEEEGGCELRVKFSRSADAPAYKQGQNQLYNELNLGRREEYDVLDKRRGRDPEMGGKPRRKNPQEGLYNELQKDKMAEAYSEIGMKGERRRGKGHDGLYQGLSTATKDTYDALHMQALPPR

SEQ ID NO: 671 - protein, 644 aa, synthetic construct
  REGION 1..644: note = Description of Artificial Sequence: Synthetic construct
MALPVTALLLPLALLLHAARPDIQMTQTTSSLSASLGDRVTISCRASQDISKYLNWYQQKPDGTVKLLIYHTSRLHSGVPSRFSGSGSGTDYSLTISNLEQEDIATYFCQQGNTLPYTFGGGTKLEITGGGGSGGGGSGGGGSEVKLQESGPGLVAPSQSLSVTCTVSGVSLPDYGVSWIRQPPRKGLEWLGVIWGSETTYYNSALKSRLTIIKDNSKSQVFLKMNSLQTDDTAIYYCAKHYYYGGSYAMDYWGQGTSVTVSSISLIAALAVDYVIGMENAMPWNLPADLAWFKRNTLNKPVIMGRHTWESIGRPLPGRKNIILSSQPGTDDRVTWVKSVDEAIAACGDVPEIMVIGGGRVIEQFLPKAQKLYLTHIDAEVEGDTHFPDYEPDDWESVFSEFHDADAQNSHSYCFEILERRTTTPAPRPPTPAPTIASQPLSLRPEACRPAAGGAVHTRGLDFACDIYIWAPLAGTCGVLLLSLVITLYCKRGRKKLLYIFKQPFMRPVQTTQEEDGCSCRFPEEEEGGCELRVKFSRSADAPAYKQGQNQLYNELNLGRREEYDVLDKRRGRDPEMGGKPRRKNPQEGLYNELQKDKMAEAYSEIGMKGERRRGKGHDGLYQGLSTATKDTYDALHMQALPPR

SEQ ID NO: 672 - protein, 593 aa, synthetic construct
  REGION 1..593: note = Description of Artificial Sequence: Synthetic construct
MALPVTALLLPLALLLHAARPDIQMTQTTSSLSASLGDRVTISCRASQDISKYLNWYQQKPDGTVKLLIYHTSRLHSGVPSRFSGSGSGTDYSLTISNLEQEDIATYFCQQGNTLPYTFGGGTKLEITGGGGSGGGGSGGGGSEVKLQESGPGLVAPSQSLSVTCTVSGVSLPDYGVSWIRQPPRKGLEWLGVIWGSETTYYNSALKSRLTIIKDNSKSQVFLKMNSLQTDDTAIYYCAKHYYYGGSYAMDYWGQGTSVTVSSTTTPAPRPPTPAPTIASQPLSLRPEACRPAAGGAVHTRGLDFACDGVQVETISPGDGRTFPKRGQTCVVHYTGMLEDGKKVDSSRDRNKPFKFMLGKQEVIRGWEEGVAQMSVGQRAKLTISPDYAYGATGHPGIIPPHATLVFDVELLKPEIYIWAPLAGTCGVLLLSLVITLYCKRGRKKLLYIFKQPFMRPVQTTQEEDGCSCRFPEEEEGGCELRVKFSRSADAPAYKQGQNQLYNELNLGRREEYDVLDKRRGRDPEMGGKPRRKNPQEGLYNELQKDKMAEAYSEIGMKGERRRGKGHDGLYQGLSTATKDTYDALHMQALPPR

SEQ ID NO: 673 - protein, 644 aa, synthetic construct
  REGION 1..644: note = Description of Artificial Sequence: Synthetic construct
MALPVTALLLPLALLLHAARPDIQMTQTTSSLSASLGDRVTISCRASQDISKYLNWYQQKPDGTVKLLIYHTSRLHSGVPSRFSGSGSGTDYSLTISNLEQEDIATYFCQQGNTLPYTFGGGTKLEITGGGGSGGGGSGGGGSEVKLQESGPGLVAPSQSLSVTCTVSGVSLPDYGVSWIRQPPRKGLEWLGVIWGSETTYYNSALKSRLTIIKDNSKSQVFLKMNSLQTDDTAIYYCAKHYYYGGSYAMDYWGQGTSVTVSSTTTPAPRPPTPAPTIASQPLSLRPEACRPAAGGAVHTRGLDFACDISLIAALAVDYVIGMENAMPWNLPADLAWFKRNTLNKPVIMGRHTWESIGRPLPGRKNIILSSQPGTDDRVTWVKSVDEAIAACGDVPEIMVIGGGRVIEQFLPKAQKLYLTHIDAEVEGDTHFPDYEPDDWESVFSEFHDADAQNSHSYCFEILERRIYIWAPLAGTCGVLLLSLVITLYCKRGRKKLLYIFKQPFMRPVQTTQEEDGCSCRFPEEEEGGCELRVKFSRSADAPAYKQGQNQLYNELNLGRREEYDVLDKRRGRDPEMGGKPRRKNPQEGLYNELQKDKMAEAYSEIGMKGERRRGKGHDGLYQGLSTATKDTYDALHMQALPPR

SEQ ID NO: 674 - protein, 649 aa, synthetic construct
  REGION 1..649: note = Description of Artificial Sequence: Synthetic construct
MALPVTALLLPLALLLHAARPDIQMTQTTSSLSASLGDRVTISCRASQDISKYLNWYQQKPDGTVKLLIYHTSRLHSGVPSRFSGSGSGTDYSLTISNLEQEDIATYFCQQGNTLPYTFGGGTKLEITGGGGSGGGGSGGGGSEVKLQESGPGLVAPSQSLSVTCTVSGVSLPDYGVSWIRQPPRKGLEWLGVIWGSETTYYNSALKSRLTIIKDNSKSQVFLKMNSLQTDDTAIYYCAKHYYYGGSYAMDYWGQGTSVTVSSTTTPAPRPPTPAPTIASQPLSLRPEACRPAAGGAVHTRGLDFACDIYIWAPLAGTCGVLLLSLVITLYCKRGRKKLLYIFKQPFMRPVQTTQEEDGCSCRFPEEEEGGCELRVKFSRSADAPAYKQGQNQLYNELNLGRREEYDVLDKRRGRDPEMGGKPRRKNPQEGLYNELQKDKMAEAYSEIGMKGERRRGKGHDGLYQGLSTATKDTYDALHMQALPPRGGSGGISLIAALAVDHVIGMENAMPWNLPADLAWFKRNTLNKPVIMGRHTWESIGRPLPGRKNIILSSQPGTDDRVTWVKSVDEAIAACGDVPEIMVIGGGRVYEQFLPKAQKLYLTHIDAEVEGDTHFPDYKPDDWESVFSEFHDADAQNSHSYCFEILERR

SEQ ID NO: 675 - protein, 598 aa, synthetic construct
  REGION 1..598: note = Description of Artificial Sequence: Synthetic construct
MALPVTALLLPLALLLHAARPDIQMTQTTSSLSASLGDRVTISCRASQDISKYLNWYQQKPDGTVKLLIYHTSRLHSGVPSRFSGSGSGTDYSLTISNLEQEDIATYFCQQGNTLPYTFGGGTKLEITGGGGSGGGGSGGGGSEVKLQESGPGLVAPSQSLSVTCTVSGVSLPDYGVSWIRQPPRKGLEWLGVIWGSETTYYNSALKSRLTIIKDNSKSQVFLKMNSLQTDDTAIYYCAKHYYYGGSYAMDYWGQGTSVTVSSTTTPAPRPPTPAPTIASQPLSLRPEACRPAAGGAVHTRGLDFACDIYIWAPLAGTCGVLLLSLVITLYCKRGRKKLLYIFKQPFMRPVQTTQEEDGCSCRFPEEEEGGCELRVKFSRSADAPAYKQGQNQLYNELNLGRREEYDVLDKRRGRDPEMGGKPRRKNPQEGLYNELQKDKMAEAYSEIGMKGERRRGKGHDGLYQGLSTATKDTYDALHMQALPPRGGSGGGVQVETISPGDGRTFPKRGQTCVVHYTGMLGDGKKVDSSRDRNKPFKFMLGKQEVIRGWEEGVAQMSVGQGAKLTISPDYAYGATGHPGIIPPHATLVFDVELLELE

SEQ ID NO: 676 - protein, 677 aa, synthetic construct
  REGION 1..677: note = Description of Artificial Sequence: Synthetic construct
MALPVTALLLPLALLLHAARPDIQMTQTTSSLSASLGDRVTISCRASQDISKYLNWYQQKPDGTVKLLIYHTSRLHSGVPSRFSGSGSGTDYSLTISNLEQEDIATYFCQQGNTLPYTFGGGTKLEITGGGGSGGGGSGGGGSEVKLQESGPGLVAPSQSLSVTCTVSGVSLPDYGVSWIRQPPRKGLEWLGVIWGSETTYYNSALKSRLTIIKDNSKSQVFLKMNSLQTDDTAIYYCAKHYYYGGSYAMDYWGQGTSVTVSSTTTPAPRPPTPAPTIASQPLSLRPEACRPAAGGAVHTRGLDFACDIYIWAPLAGTCGVLLLSLVITLYCKRGRKKLLYIFKQPFMRPVQTTQEEDGCSCRFPEEEEGGCELRVKFSRSADAPAYKQGQNQLYNELNLGRREEYDVLDKRRGRDPEMGGKPRRKNPQEGLYNELQKDKMAEAYSEIGMKGERRRGKGHDGLYQGLSTATKDTYDALHMQALPPRGGSGGVGSLNCIVAVSQNMGIGKNGDLPWPPLRNEFRYFQRMTTTSSVEGKQNLVIMGKKTWFSIPEKNRPLKGRINLVLSRELKEPPQGAHFLSRSLDDALKLTEQPELANKVDMVWIVGGSSVIKEAMNHPGHLKLFVTRIMQDFESDTFFPEIDLEKYKLLPEYPGVLSDVQEEKGIKYKFEVYEKND

SEQ ID NO: 677 - protein, 677 aa, synthetic construct
  REGION 1..677: note = Description of Artificial Sequence: Synthetic construct
MALPVTALLLPLALLLHAARPDIQMTQTTSSLSASLGDRVTISCRASQDISKYLNWYQQKPDGTVKLLIYHTSRLHSGVPSRFSGSGSGTDYSLTISNLEQEDIATYFCQQGNTLPYTFGGGTKLEITGGGGSGGGGSGGGGSEVKLQESGPGLVAPSQSLSVTCTVSGVSLPDYGVSWIRQPPRKGLEWLGVIWGSETTYYNSALKSRLTIIKDNSKSQVFLKMNSLQTDDTAIYYCAKHYYYGGSYAMDYWGQGTSVTVSSTTTPAPRPPTPAPTIASQPLSLRPEACRPAAGGAVHTRGLDFACDIYIWAPLAGTCGVLLLSLVITLYCKRGRKKLLYIFKQPFMRPVQTTQEEDGCSCRFPEEEEGGCELRVKFSRSADAPAYKQGQNQLYNELNLGRREEYDVLDKRRGRDPEMGGKPRRKNPQEGLYNELQKDKMAEAYSEIGMKGERRRGKGHDGLYQGLSTATKDTYDALHMQALPPRGGSGGVGSLNCIVAVSQNMGIGKNGDLPWPPLRNEFRYFQRMTTTSSVEGKQNLVIMGKKTWFSIPEKNRPLKGRINLVLSRELKEPPQGAHFLSRSLDDALKLTEQPELANKVDMVWIVGGSSVIKEFMNHPGHLKLFVTRIMQDFESDTFFPEIDLEKYKLLPEYPGVLSDVQEEKGIKYKFEVYEKND

SEQ ID NO: 678 - protein, 677 aa, synthetic construct
  REGION 1..677: note = Description of Artificial Sequence: Synthetic construct
MALPVTALLLPLALLLHAARPDIQMTQTTSSLSASLGDRVTISCRASQDISKYLNWYQQKPDGTVKLLIYHTSRLHSGVPSRFSGSGSGTDYSLTISNLEQEDIATYFCQQGNTLPYTFGGGTKLEITGGGGSGGGGSGGGGSEVKLQESGPGLVAPSQSLSVTCTVSGVSLPDYGVSWIRQPPRKGLEWLGVIWGSETTYYNSALKSRLTIIKDNSKSQVFLKMNSLQTDDTAIYYCAKHYYYGGSYAMDYWGQGTSVTVSSTTTPAPRPPTPAPTIASQPLSLRPEACRPAAGGAVHTRGLDFACDIYIWAPLAGTCGVLLLSLVITLYCKRGRKKLLYIFKQPFMRPVQTTQEEDGCSCRFPEEEEGGCELRVKFSRSADAPAYKQGQNQLYNELNLGRREEYDVLDKRRGRDPEMGGKPRRKNPQEGLYNELQKDKMAEAYSEIGMKGERRRGKGHDGLYQGLSTATKDTYDALHMQALPPRGGSGGVGSLNCIVAVSQNMGIGKNGDLPWPPLRNEFRYFKRMTTTSSVEGKQNLVIMGKKTWFSIPEKNRPLKGRINLVLSRELKEPPQGAHFLSRSLDDALKLTEQPELANKVDMVWIVGGSSVIKEAMNHPGHLKLFVTRIMQDFESDTFFPEIDLEKYKLLPEYPGVLSDVQEEKGIKYKFEVYEKND

SEQ ID NO: 679 - protein, 677 aa, synthetic construct
  REGION 1..677: note = Description of Artificial Sequence: Synthetic construct
MALPVTALLLPLALLLHAARPDIQMTQTTSSLSASLGDRVTISCRASQDISKYLNWYQQKPDGTVKLLIYHTSRLHSGVPSRFSGSGSGTDYSLTISNLEQEDIATYFCQQGNTLPYTFGGGTKLEITGGGGSGGGGSGGGGSEVKLQESGPGLVAPSQSLSVTCTVSGVSLPDYGVSWIRQPPRKGLEWLGVIWGSETTYYNSALKSRLTIIKDNSKSQVFLKMNSLQTDDTAIYYCAKHYYYGGSYAMDYWGQGTSVTVSSTTTPAPRPPTPAPTIASQPLSLRPEACRPAAGGAVHTRGLDFACDIYIWAPLAGTCGVLLLSLVITLYCKRGRKKLLYIFKQPFMRPVQTTQEEDGCSCRFPEEEEGGCELRVKFSRSADAPAYKQGQNQLYNELNLGRREEYDVLDKRRGRDPEMGGKPRRKNPQEGLYNELQKDKMAEAYSEIGMKGERRRGKGHDGLYQGLSTATKDTYDALHMQALPPRGGSGGVGSLNCIVAVSQNMGIGKNGDLPWPPLRNEFRYFFRMTTTSSVEGKQNLVIMGKKTWFSIPEKFRPLKGRINLVLSRELKEPPQGAHFLSRSLDDALKLTEQPELANKVDMVWIVGGSSVIKEAMNHPGHLKLFVTRIMQDFESDTFFPEIDLEKYKLLPEYPGVLSDVQEEKGIKYKFEVYEKND

SEQ ID NO: 680 - protein, 607 aa, synthetic construct
  REGION 1..607: note = Description of Artificial Sequence: Synthetic construct
MALPVTALLLPLALLLHAARPSGGVQVETISPGDGRTFPKRGQTCVVHYTGMLEDGKKVDSSRDRNKPFKFMLGKQEVIRGWEEGVAQMSVGQRAKLTISPDYAYGATGHPGIIPPHATLVFDVELLKPEESRRVRRNKRSKDIQMTQTTSSLSASLGDRVTISCRASQDISKYLNWYQQKPDGTVKLLIYHTSRLHSGVPSRFSGSGSGTDYSLTISNLEQEDIATYFCQQGNTLPYTFGGGTKLEITGGGGSGGGGSGGGGSEVKLQESGPGLVAPSQSLSVTCTVSGVSLPDYGVSWIRQPPRKGLEWLGVIWGSETTYYNSALKSRLTIIKDNSKSQVFLKMNSLQTDDTAIYYCAKHYYYGGSYAMDYWGQGTSVTVSSTTTPAPRPPTPAPTIASQPLSLRPEACRPAAGGAVHTRGLDFACDIYIWAPLAGTCGVLLLSLVITLYCKRGRKKLLYIFKQPFMRPVQTTQEEDGCSCRFPEEEEGGCELRVKFSRSADAPAYKQGQNQLYNELNLGRREEYDVLDKRRGRDPEMGGKPRRKNPQEGLYNELQKDKMAEAYSEIGMKGERRRGKGHDGLYQGLSTATKDTYDALHMQALPPR

SEQ ID NO: 681 - protein, 658 aa, synthetic construct
  REGION 1..658: note = Description of Artificial Sequence: Synthetic construct
MALPVTALLLPLALLLHAARPSGISLIAALAVDYVIGMENAMPWNLPADLAWFKRNTLNKPVIMGRHTWESIGRPLPGRKNIILSSQPGTDDRVTWVKSVDEAIAACGDVPEIMVIGGGRVIEQFLPKAQKLYLTHIDAEVEGDTHFPDYEPDDWESVFSEFHDADAQNSHSYCFEILERRESRRVRRNKRSKDIQMTQTTSSLSASLGDRVTISCRASQDISKYLNWYQQKPDGTVKLLIYHTSRLHSGVPSRFSGSGSGTDYSLTISNLEQEDIATYFCQQGNTLPYTFGGGTKLEITGGGGSGGGGSGGGGSEVKLQESGPGLVAPSQSLSVTCTVSGVSLPDYGVSWIRQPPRKGLEWLGVIWGSETTYYNSALKSRLTIIKDNSKSQVFLKMNSLQTDDTAIYYCAKHYYYGGSYAMDYWGQGTSVTVSSTTTPAPRPPTPAPTIASQPLSLRPEACRPAAGGAVHTRGLDFACDIYIWAPLAGTCGVLLLSLVITLYCKRGRKKLLYIFKQPFMRPVQTTQEEDGCSCRFPEEEEGGCELRVKFSRSADAPAYKQGQNQLYNELNLGRREEYDVLDKRRGRDPEMGGKPRRKNPQEGLYNELQKDKMAEAYSEIGMKGERRRGKGHDGLYQGLSTATKDTYDALHMQALPPR

SEQ ID NO: 682 - protein, 686 aa, synthetic construct
  REGION 1..686: note = Description of Artificial Sequence: Synthetic construct
MALPVTALLLPLALLLHAARPSGVGSLNCIVAVSQNMGIGKNGDLPWPPLRNEFRYFQRMTTTSSVEGKQNLVIMGKKTWFSIPEKNRPLKGRINLVLSRELKEPPQGAHFLSRSLDDALKLTEQPELANKVDMVWIVGGSSVIKEFMNHPGHLKLFVTRIMQDFESDTFFPEIDLEKYKLLPEYPGVLSDVQEEKGIKYKFEVYEKNDESRRVRRNKRSKDIQMTQTTSSLSASLGDRVTISCRASQDISKYLNWYQQKPDGTVKLLIYHTSRLHSGVPSRFSGSGSGTDYSLTISNLEQEDIATYFCQQGNTLPYTFGGGTKLEITGGGGSGGGGSGGGGSEVKLQESGPGLVAPSQSLSVTCTVSGVSLPDYGVSWIRQPPRKGLEWLGVIWGSETTYYNSALKSRLTIIKDNSKSQVFLKMNSLQTDDTAIYYCAKHYYYGGSYAMDYWGQGTSVTVSSTTTPAPRPPTPAPTIASQPLSLRPEACRPAAGGAVHTRGLDFACDIYIWAPLAGTCGVLLLSLVITLYCKRGRKKLLYIFKQPFMRPVQTTQEEDGCSCRFPEEEEGGCELRVKFSRSADAPAYKQGQNQLYNELNLGRREEYDVLDKRRGRDPEMGGKPRRKNPQEGLYNELQKDKMAEAYSEIGMKGERRRGKGHDGLYQGLSTATKDTYDALHMQALPPR

SEQ ID NO: 683 - protein, 686 aa, synthetic construct
  REGION 1..686: note = Description of Artificial Sequence: Synthetic construct
MALPVTALLLPLALLLHAARPSGVGSLNCIVAVSQNMGIGKNGDLPWPPLRNEFRYFKRMTTTSSVEGKQNLVIMGKKTWFSIPEKNRPLKGRINLVLSRELKEPPQGAHFLSRSLDDALKLTEQPELANKVDMVWIVGGSSVIKEAMNHPGHLKLFVTRIMQDFESDTFFPEIDLEKYKLLPEYPGVLSDVQEEKGIKYKFEVYEKNDESRRVRRNKRSKDIQMTQTTSSLSASLGDRVTISCRASQDISKYLNWYQQKPDGTVKLLIYHTSRLHSGVPSRFSGSGSGTDYSLTISNLEQEDIATYFCQQGNTLPYTFGGGTKLEITGGGGSGGGGSGGGGSEVKLQESGPGLVAPSQSLSVTCTVSGVSLPDYGVSWIRQPPRKGLEWLGVIWGSETTYYNSALKSRLTIIKDNSKSQVFLKMNSLQTDDTAIYYCAKHYYYGGSYAMDYWGQGTSVTVSSTTTPAPRPPTPAPTIASQPLSLRPEACRPAAGGAVHTRGLDFACDIYIWAPLAGTCGVLLLSLVITLYCKRGRKKLLYIFKQPFMRPVQTTQEEDGCSCRFPEEEEGGCELRVKFSRSADAPAYKQGQNQLYNELNLGRREEYDVLDKRRGRDPEMGGKPRRKNPQEGLYNELQKDKMAEAYSEIGMKGERRRGKGHDGLYQGLSTATKDTYDALHMQALPPR

SEQ ID NO: 684 - protein, 677 aa, synthetic construct; identical to SEQ ID NO: 676
  REGION 1..677: note = Description of Artificial Sequence: Synthetic polypeptide

SEQ ID NO: 685 - protein, 488 aa, synthetic construct
  REGION 1..488: note = Description of Artificial Sequence: Synthetic polypeptide
MALPVTALLLPLALLLHAARPDIQMTQTTSSLSASLGDRVTISCRASQDISKYLNWYQQKPDGTVKLLIYHTSRLHSGVPSRFSGSGSGTDYSLTISNLEQEDIATYFCQQGNTLPYTFGGGTKLEITGGGGSGGGGSGGGGSEVKLQESGPGLVAPSQSLSVTCTVSGVSLPDYGVSWIRQPPRKGLEWLGVIWGSETTYYNSALKSRLTIIKDNSKSQVFLKMNSLQTDDTAIYYCAKHYYYGGSYAMDYWGQGTSVTVSSTTTPAPRPPTPAPTIASQPLSLRPEACRPAAGGAVHTRGLDFACDIYIWAPLAGTCGVLLLSLVITLYCKRGRKKLLYIFKQPFMRPVQTTQEEDGCSCRFPEEEEGGCELRVKFSRSADAPAYKQGQNQLYNELNLGRREEYDVLDKRRGRDPEMGGKPRRKNPQEGLYNELQKDKMAEAYSEIGMKGERRRGKGHDGLYQGLSTATKDTYDALHMQALPPRGS

SEQ ID NO: 686 - protein, 508 aa, synthetic construct
  REGION 1..508: note = Description of Artificial Sequence: Synthetic polypeptide
MALPVTALLLPLALLLHAARPDIQMTQTTSSLSASLGDRVTISCRASQDISKYLNWYQQKPDGTVKLLIYHTSRLHSGVPSRFSGSGSGTDYSLTISNLEQEDIATYFCQQGNTLPYTFGGGTKLEITGGGGSGGGGSGGGGSEVKLQESGPGLVAPSQSLSVTCTVSGVSLPDYGVSWIRQPPRKGLEWLGVIWGSETTYYNSALKSRLTIIKDNSKSQVFLKMNSLQTDDTAIYYCAKHYYYGGSYAMDYWGQGTSVTVSSTTTPAPRPPTPAPTIASQPLSLRPEACRPAAGGAVHTRGLDFACDIYIWAPLAGTCGVLLLSLVITLYCKRGRKKLLYIFKQPFMRPVQTTQEEDGCSCRFPEEEEGGCELRVKFSRSADAPAYKQGQNQLYNELNLGRREEYDVLDKRRGRDPEMGGKPRRKNPQEGLYNELQKDKMAEAYSEIGMKGERRRGKGHDGLYQGLSTATKDTYDALHMQALPPRGATNFSLLKQAGDVEENPGPGS

SEQ ID NO: 687 - protein, 497 aa, synthetic construct
  REGION 1..497: note = Description of Artificial Sequence: Synthetic polypeptide
MALPVTALLLPLALLLHAARPYPYDVPDYADIQMTQTTSSLSASLGDRVTISCRASQDISKYLNWYQQKPDGTVKLLIYHTSRLHSGVPSRFSGSGSGTDYSLTISNLEQEDIATYFCQQGNTLPYTFGGGTKLEITGGGGSGGGGSGGGGSEVKLQESGPGLVAPSQSLSVTCTVSGVSLPDYGVSWIRQPPRKGLEWLGVIWGSETTYYNSALKSRLTIIKDNSKSQVFLKMNSLQTDDTAIYYCAKHYYYGGSYAMDYWGQGTSVTVSSTTTPAPRPPTPAPTIASQPLSLRPEACRPAAGGAVHTRGLDFACDIYIWAPLAGTCGVLLLSLVITLYCKRGRKKLLYIFKQPFMRPVQTTQEEDGCSCRFPEEEEGGCELRVKFSRSADAPAYKQGQNQLYNELNLGRREEYDVLDKRRGRDPEMGGKPRRKNPQEGLYNELQKDKMAEAYSEIGMKGERRRGKGHDGLYQGLSTATKDTYDALHMQALPPRGS

SEQ ID NO: 688 - protein, 502 aa, synthetic construct
  REGION 1..502: note = Description of Artificial Sequence: Synthetic polypeptide
MALPVTALLLPLALLLHAARPDIQMTQTTSSLSASLGDRVTISCRASQDISKYLNWYQQKPDGTVKLLIYHTSRLHSGVPSRFSGSGSGTDYSLTISNLEQEDIATYFCQQGNTLPYTFGGGTKLEITGGGGSGGGGSGGGGSEVKLQESGPGLVAPSQSLSVTCTVSGVSLPDYGVSWIRQPPRKGLEWLGVIWGSETTYYNSALKSRLTIIKDNSKSQVFLKMNSLQTDDTAIYYCAKHYYYGGSYAMDYWGQGTSVTVSSTTTPAPRPPTPAPTIASQPLSLRPEACRPAAGGAVHTRGLDFACDIYIWAPLAGTCGVLLLSLVITLYCKRGRKKLLYIFKQPFMRPVQTTQEEDGCSCRFPEEEEGGCELRVKFSRSADAPAYKQGQNQLYNELNLGRREEYDVLDKRRGRDPEMGGKPRRKNPQEGLYNELQKDKMAEAYSEIGMKGERRRGKGHDGLYQGLSTATKDTYDALHMQALPPRSGESRRVRRNKRSKGS

SEQ ID NO: 689 - protein, 486 aa, synthetic construct; identical to SEQ ID NO: 669
  REGION 1..486: note = Description of Artificial Sequence: Synthetic polypeptide

SEQ ID NO: 690 - protein, 743 aa, synthetic construct
  REGION 1..743: note = Description of Artificial Sequence: Synthetic polypeptide
MALPVTALLLPLALLLHAARPDIQMTQTTSSLSASLGDRVTISCRASQDISKYLNWYQQKPDGTVKLLIYHTSRLHSGVPSRFSGSGSGTDYSLTISNLEQEDIATYFCQQGNTLPYTFGGGTKLEITGGGGSGGGGSGGGGSEVKLQESGPGLVAPSQSLSVTCTVSGVSLPDYGVSWIRQPPRKGLEWLGVIWGSETTYYNSALKSRLTIIKDNSKSQVFLKMNSLQTDDTAIYYCAKHYYYGGSYAMDYWGQGTSVTVSSTTTPAPRPPTPAPTIASQPLSLRPEACRPAAGGAVHTRGLDFACDIYIWAPLAGTCGVLLLSLVITLYCKRGRKKLLYIFKQPFMRPVQTTQEEDGCSCRFPEEEEGGCELRVKFSRSADAPAYKQGQNQLYNELNLGRREEYDVLDKRRGRDPEMGGKPRRKNPQEGLYNELQKDKMAEAYSEIGMKGERRRGKGHDGLYQGLSTATKDTYDALHMQALPPRGSGATNFSLLKQAGDVEENPGPLSKGEEDNMAIIKEFMRFKVHMEGSVNGHEFEIEGEGEGRPYEGTQTAKLKVTKGGPLPFAWDILSPQFMYGSKAYVKHPADIPDYLKLSFPEGFKWERVMNFEDGGVVTVTQDSSLQDGEFIYKVKLRGTNFPSDGPVMQKKTMGWEASSERMYPEDGALKGEIKQRLKLKDGGHYDAEVKTTYKAKKPVQLPGAYNVNIKLDITSHNEDYTIVEQYERAEGRHSTGGMDELYK

SEQ ID NO: 691 - protein, 885 aa, synthetic construct
  REGION 1..885: note = Description of Artificial Sequence: Synthetic polypeptide
MALPVTALLLPLALLLHAARPDIQMTQTTSSLSASLGDRVTISCRASQDISKYLNWYQQKPDGTVKLLIYHTSRLHSGVPSRFSGSGSGTDYSLTISNLEQEDIATYFCQQGNTLPYTFGGGTKLEITGGGGSGGGGSGGGGSEVKLQESGPGLVAPSQSLSVTCTVSGVSLPDYGVSWIRQPPRKGLEWLGVIWGSETTYYNSALKSRLTIIKDNSKSQVFLKMNSLQTDDTAIYYCAKHYYYGGSYAMDYWGQGTSVTVSSTTTPAPRPPTPAPTIASQPLSLRPEACRPAAGGAVHTRGLDFACDIYIWAPLAGTCGVLLLSLVITLYCKRGRKKLLYIFKQPFMRPVQTTQEEDGCSCRFPEEEEGGCELRVKFSRSADAPAYKQGQNQLYNELNLGRREEYDVLDKRRGRDPEMGGKPRRKNPQEGLYNELQKDKMAEAYSEIGMKGERRRGKGHDGLYQGLSTATKDTYDALHMQALPPRGSGATNFSLLKQAGDVEENPGPNWVNVISDLKKIEDLIQSMHIDATLYTESDVHPSCKVTAMKCFLLELQVISLESGDASIHDTVENLIILANNSLSSNGNVTESGCKECEELEEKNIKEFLQSFVHIVQMFINTSSGGGSGGGGSGGGGSGGGGSGGGSLQITCPPPMSVEHADIWVKSYSLYSRERYICNSGFKRKAGTSSLTECVLNKATNVAHWTTPSLKCIRDPALVHQRPAPPSTVTTAGVTPQPESLSPSGKEPAASSPSSNNTAATTAAIVPGSQLMPSKSPSTGTTEISSHESSHGTPSQTTAKNWELTASASHQPPGVYPQGHSDTTVAISTSTVLLCGLSAVSLLACYLKSRQTPPLASVEMEAMEALPVTWGTSSRDEDLENCSHHL

SEQ ID NO: 692 - protein, 907 aa, synthetic construct
  REGION 1..907: note = Description of Artificial Sequence: Synthetic polypeptide
MALPVTALLLPLALLLHAARPDIQMTQTTSSLSASLGDRVTISCRASQDISKYLNWYQQKPDGTVKLLIYHTSRLHSGVPSRFSGSGSGTDYSLTISNLEQEDIATYFCQQGNTLPYTFGGGTKLEITGGGGSGGGGSGGGGSEVKLQESGPGLVAPSQSLSVTCTVSGVSLPDYGVSWIRQPPRKGLEWLGVIWGSETTYYNSALKSRLTIIKDNSKSQVFLKMNSLQTDDTAIYYCAKHYYYGGSYAMDYWGQGTSVTVSSTTTPAPRPPTPAPTIASQPLSLRPEACRPAAGGAVHTRGLDFACDIYIWAPLAGTCGVLLLSLVITLYCKRGRKKLLYIFKQPFMRPVQTTQEEDGCSCRFPEEEEGGCELRVKFSRSADAPAYKQGQNQLYNELNLGRREEYDVLDKRRGRDPEMGGKPRRKNPQEGLYNELQKDKMAEAYSEIGMKGERRRGKGHDGLYQGLSTATKDTYDALHMQALPPRGSGATNFSLLKQAGDVEENPGPMLLLVTSLLLCELPHPAFLLIPNWVNVISDLKKIEDLIQSMHIDATLYTESDVHPSCKVTAMKCFLLELQVISLESGDASIHDTVENLIILANNSLSSNGNVTESGCKECEELEEKNIKEFLQSFVHIVQMFINTSSGGGSGGGGSGGGGSGGGGSGGGSLQITCPPPMSVEHADIWVKSYSLYSRERYICNSGFKRKAGTSSLTECVLNKATNVAHWTTPSLKCIRDPALVHQRPAPPSTVTTAGVTPQPESLSPSGKEPAASSPSSNNTAATTAAIVPGSQLMPSKSPSTGTTEISSHESSHGTPSQTTAKNWELTASASHQPPGVYPQGHSDTTVAISTSTVLLCGLSAVSLLACYLKSRQTPPLASVEMEAMEALPVTWGTSSRDEDLENCSHHL

SEQ ID NO: 693 - protein, 903 aa, synthetic construct
  REGION 1..903: note = Description of Artificial Sequence: Synthetic polypeptide
MALPVTALLLPLALLLHAARPDIQMTQTTSSLSASLGDRVTISCRASQDISKYLNWYQQKPDGTVKLLIYHTSRLHSGVPSRFSGSGSGTDYSLTISNLEQEDIATYFCQQGNTLPYTFGGGTKLEITGGGGSGGGGSGGGGSEVKLQESGPGLVAPSQSLSVTCTVSGVSLPDYGVSWIRQPPRKGLEWLGVIWGSETTYYNSALKSRLTIIKDNSKSQVFLKMNSLQTDDTAIYYCAKHYYYGGSYAMDYWGQGTSVTVSSTTTPAPRPPTPAPTIASQPLSLRPEACRPAAGGAVHTRGLDFACDIYIWAPLAGTCGVLLLSLVITLYCKRGRKKLLYIFKQPFMRPVQTTQEEDGCSCRFPEEEEGGCELRVKFSRSADAPAYKQGQNQLYNELNLGRREEYDVLDKRRGRDPEMGGKPRRKNPQEGLYNELQKDKMAEAYSEIGMKGERRRGKGHDGLYQGLSTATKDTYDALHMQALPPRGSGATNFSLLKQAGDVEENPGPMDWTWILFLVAAATRVHSNWVNVISDLKKIEDLIQSMHIDATLYTESDVHPSCKVTAMKCFLLELQVISLESGDASIHDTVENLIILANNSLSSNGNVTESGCKECEELEEKNIKEFLQSFVHIVQMFINTSSGGGSGGGGSGGGGSGGGGSGGGSLQITCPPPMSVEHADIWVKSYSLYSRERYICNSGFKRKAGTSSLTECVLNKATNVAHWTTPSLKCIRDPALVHQRPAPPSTVTTAGVTPQPESLSPSGKEPAASSPSSNNTAATTAAIVPGSQLMPSKSPSTGTTEISSHESSHGTPSQTTAKNWELTASASHQPPGVYPQGHSDTTVAISTSTVLLCGLSAVSLLACYLKSRQTPPLASVEMEAMEALPVTWGTSSRDEDLENCSHHL

SEQ ID NO: 694 - protein, 604 aa, synthetic construct
  REGION 1..604: note = Description of Artificial Sequence: Synthetic construct
MALPVTALLLPLALLLHAARPDIQMTQTTSSLSASLGDRVTISCRASQDISKYLNWYQQKPDGTVKLLIYHTSRLHSGVPSRFSGSGSGTDYSLTISNLEQEDIATYFCQQGNTLPYTFGGGTKLEITGGGGSGGGGSGGGGSEVKLQESGPGLVAPSQSLSVTCTVSGVSLPDYGVSWIRQPPRKGLEWLGVIWGSETTYYNSALKSRLTIIKDNSKSQVFLKMNSLQTDDTAIYYCAKHYYYGGSYAMDYWGQGTSVTVSSTTTPAPRPPTPAPTIASQPLSLRPEACRPAAGGAVHTRGLDFACDIYIWAPLAGTCGVLLLSLVITLYCKRGRKKLLYIFKQPFMRPVQTTQEEDGCSCRFPEEEEGGCELRVKFSRSADAPAYKQGQNQLYNELNLGRREEYDVLDKRRGRDPEMGGKPRRKNPQEGLYNELQKDKMAEAYSEIGMKGERRRGKGHDGLYQGLSTATKDTYDALHMQALPPRTRYPYDVPDYAGVQVETISPGDGRTFPKRGQTCVVHYTGMLGDGKKVDSSRDRNKPFKFMLGKQEVIRGWEEGVAQMSVGQGAKLTISPDYAYGATGHPGIIPPHATLVFDVELLELE

SEQ ID NO: 695 - protein, 9 aa, synthetic construct
  REGION 1..9: note = Description of Artificial Sequence: Synthetic construct
MHRSAAAAT

SEQ ID NO: 696 - protein, 12 aa, synthetic construct
  REGION 1..12: note = Description of Artificial Sequence: Synthetic construct
IPPPPPLSLPPP

SEQ ID NO: 697 - protein, 43 aa, synthetic construct
  REGION 1..43: note = Description of Artificial Sequence: Synthetic construct
RYWPKPLGIRPVCVCLYVIFHHIAVFWQCEGPETWPCLLDEHS

SEQ ID NO: 698 - protein, 102 aa, synthetic construct
  REGION 1..102: note = Description of Artificial Sequence: Synthetic construct
GSFPSRQRNARSVECREGSSSSGSFLKTNNVCSDPLQAAEPPTWRQVPLRPKATCIRYTCKGGTTPVPRCELDSCGKSQMALLKRIQQGAEGCPEGTPLYGI

SEQ ID NO: 699 - protein, 41 aa, synthetic construct
  REGION 1..41: note = Description of Artificial Sequence: Synthetic construct
SGASVHMLYMCLVEVKKTSRPPEPRGRGFPLKNTMIIWPQP

SEQ ID NO: 700 - protein, 24 aa, synthetic construct
  REGION 1..24: note = Description of Artificial Sequence: Synthetic construct
ARARRITWPSSRSSCASRCTWRAP

SEQ ID NO: 701 - protein, 23 aa, synthetic construct
  REGION 1..23: note = Description of Artificial Sequence: Synthetic construct
TATSSRSRARARAAPTRAPRPPS

SEQ ID NO: 702 - protein, 24 aa, synthetic construct
  REGION 1..24: note = Description of Artificial Sequence: Synthetic construct
PRVAPCPSPGTSCPLSSCTAPRPT

SEQ ID NO: 703 - protein, 9 aa, synthetic construct
  REGION 1..9: note = Description of Artificial Sequence: Synthetic construct
STPPTSPTT

SEQ ID NO: 704 - protein, 12 aa, synthetic construct
  REGION 1..12: note = Description of Artificial Sequence: Synthetic construct
SCPSPRASSGSA

SEQ ID NO: 705 - protein, 7 aa, synthetic construct
  REGION 1..7: note = Description of Artificial Sequence: Synthetic construct
TSRTAAW

SEQ ID NO: 706 - protein, 14 aa, synthetic construct
  REGION 1..14: note = Description of Artificial Sequence: Synthetic construct
PRTPPCRTASSSTR

SEQ ID NO: 707 - protein, 12 aa, synthetic construct
  REGION 1..12: note = Description of Artificial Sequence: Synthetic construct
SCAAPTSPPTAP

SEQ ID NO: 708 - protein, 21 aa, synthetic construct
  REGION 1..21: note = Description of Artificial Sequence: Synthetic construct
CRRRPWAGRPPPSGCTPRTAP

SEQ ID NO: 709 - protein, 7 aa, synthetic construct
  REGION 1..7: note = Description of Artificial Sequence: Synthetic construct
RARSSRG

SEQ ID NO: 710 - protein, 64 aa, synthetic construct
  REGION 1..64: note = Description of Artificial Sequence: Synthetic construct
RTAATTTLRSRPPTRPRSPCSCPAPTTSTSSWTSPPTTRTTPSWNSTNAPRAATPPAAWTSCTS

SEQ ID NO: 711 - protein, 107 aa, Homo sapiens; identical to SEQ ID NO: 192

SEQ ID NO: 712 - protein, 187 aa, Homo sapiens; identical to SEQ ID NO: 1

SEQ ID NO: 713 - protein, 159 aa, Escherichia coli [sequence omitted]

SEQ ID NO: 714 - protein, 327 aa, Homo sapiens; identical to SEQ ID NO: 195

SEQ ID NO: 715 - protein, 189 aa, Homo sapiens; identical to SEQ ID NO: 196

SEQ ID NO: 716 - protein, 260 aa, Homo sapiens; identical to SEQ ID NO: 197

SEQ ID NO: 717 - protein, 231 aa, Homo sapiens; identical to SEQ ID NO: 198

SEQ ID NO: 718 - protein, 114 aa, Homo sapiens
NWVNVISDLKKIEDLIQSMHIDATLYTESDVHPSCKVTAMKCFLLELQVISLESGDASIHDTVENLIILANNSLSSNGNVTESGCKECEELEEKNIKEFLQSFVHIVQMFINTS

SEQ ID NO: 719 - protein, 267 aa, Homo sapiens
MAPRRARGCRTLGLPALLLLLLLRPPATRGITCPPPMSVEHADIWVKSYSLYSRERYICNSGFKRKAGTSSLTECVLNKATNVAHWTTPSLKCIRDPALVHQRPAPPSTVTTAGVTPQPESLSPSGKEPAASSPSSNNTAATTAAIVPGSQLMPSKSPSTGTTEISSHESSHGTPSQTTAKNWELTASASHQPPGVYPQGHSDTTVAISTSTVLLCGLSAVSLLACYLKSRQTPPLASVEMEAMEALPVTWGTSSRDEDLENCSHHL

SEQ ID NO: 720 - protein, 234 aa, Homo sapiens
MAPRRARGCRTLGLPALLLLLLLRPPATRGITCPPPMSVEHADIWVKSYSLYSRERYICNSGFKRKAGTSSLTECVLNKATNVAHWTTPSLKCIKPAASSPSSNNTAATTAAIVPGSQLMPSKSPSTGTTEISSHESSHGTPSQTTAKNWELTASASHQPPGVYPQGHSDTTVAISTSTVLLCGLSAVSLLACYLKSRQTPPLASVEMEAMEALPVTWGTSSRDEDLENCSHHL

SEQ ID NO: 721 - protein, 231 aa, Homo sapiens
MSVEHADIWVKSYSLYSRERYICNSGFKRKAGTSSLTECVLNKATNVAHWTTPSLKCIRDPALVHQRPAPPSTVTTAGVTPQPESLSPSGKEPAASSPSSNNTAATTAAIVPGSQLMPSKSPSTGTTEISSHESSHGTPSQTTAKNWELTASASHQPPGVYPQGHSDTTVAISTSTVLLCGLSAVSLLACYLKSRQTPPLASVEMEAMEALPVTWGTSSRDEDLENCSHHL

SEQ ID NO: 722 - protein, 353 aa, Homo sapiens
MRLAGRQVPEQRSPPPPGLGSARPGSPAVSCGAAAMAPRRARGCRTLGLPALLLLLLLRPPATRDARDRLAVLAGRSRISESFNHEVQTHEACVRLRTMENCPQCHHHRTSRQQAGITCPPPMSVEHADIWVKSYSLYSRERYICNSGFKRKAGTSSLTECVLNKATNVAHWTTPSLKCIRDPALVHQRPAPPSTVTTAGVTPQPESLSPSGKEPAASSPSSNNTAATTAAIVPGSQLMPSKSPSTGTTEISSHESSHGTPSQTTAKNWELTASASHQPPGVYPQGHSDTTVAISTSTVLLCGLSAVSLLACYLKSRQTPPLASVEMEAMEALPVTWGTSSRDEDLENCSHHL

SEQ ID NO: 723 - protein, 61 aa, Homo sapiens
CPPPMSVEHADIWVKSYSLYSRERYICNSGFKRKAGTSSLTECVLNKATNVAHWTTPSLKC

SEQ ID NO: 724 - protein, 237 aa, Homo sapiens
ITCPPPMSVEHADIWVKSYSLYSRERYICNSGFKRKAGTSSLTECVLNKATNVAHWTTPSLKCIRDPALVHQRPAPPSTVTTAGVTPQPESLSPSGKEPAASSPSSNNTAATTAAIVPGSQLMPSKSPSTGTTEISSHESSHGTPSQTTAKNWELTASASHQPPGVYPQGHSDTTVAISTSTVLLCGLSAVSLLACYLKSRQTPPLASVEMEAMEALPVTWGTSSRDEDLENCSHHL

SEQ ID NO: 725 - protein, 175 aa, Homo sapiens
ITCPPPMSVEHADIWVKSYSLYSRERYICNSGFKRKAGTSSLTECVLNKATNVAHWTTPSLKCIRDPALVHQRPAPPSTVTTAGVTPQPESLSPSGKEPAASSPSSNNTAATTAAIVPGSQLMPSKSPSTGTTEISSHESSHGTPSQTTAKNWELTASASHQPPGVYPQGHSDTT

SEQ ID NO: 726 - protein, 65 aa, Homo sapiens
ITCPPPMSVEHADIWVKSYSLYSRERYICNSGFKRKAGTSSLTECVLNKATNVAHWTTPSLKCIR

SEQ ID NO: 727 - protein, 107 aa, Homo sapiens; identical to SEQ ID NO: 192

SEQ ID NO: 728 - protein, 187 aa, Homo sapiens; identical to SEQ ID NO: 1

SEQ ID NO: 729 - protein, 159 aa, Homo sapiens [sequence omitted]

SEQ ID NO: 730 - protein, 327 aa, Homo sapiens; identical to SEQ ID NO: 195

SEQ ID NO: 731 - protein, 189 aa, Homo sapiens; identical to SEQ ID NO: 196

SEQ ID NO: 732 - protein, 260 aa, Homo sapiens; identical to SEQ ID NO: 197

SEQ ID NO: 733 - protein, 231 aa, Homo sapiens; identical to SEQ ID NO: 198

SEQ ID NO: 734 - protein, 306 aa, Homo sapiens
IWELKKDVYVVELDWYPDAPGEMVVLTCDTPEEDGITWTLDQSSEVLGSGKTLTIQVKEFGDAGQYTCHKGGEVLSHSLLLLHKKEDGIWSTDILKDQKEPKNKTFLRCEAKNYSGRFTCWWLTTISTDLTFSVKSSRGSSDPQGVTCGAATLSAERVRGDNKEYEYSVECQEDSACPAAEESLPIEVMVDAVHKLKYENYTSSFFIRDIIKPDPPKNLQLKPLKNSRQVEVSWEYPDTWSTPHSYFSLTFCVQVQGKSKREKKDRVFTDKTSATVICRKNASISVRAQDRYYSSSWSEWASVPCS

SEQ ID NO: 735 - protein, 197 aa, Homo sapiens
RNLPVATPDPGMFPCLHHSQNLLRAVSNMLQKARQTLEFYPCTSEEIDHEDITKDKTSTVEACLPLELTKNESCLNSRETSFITNGSCLASRKTSFMMALCLSSIYEDLKMYQVEFKTMNAKLLMDPKRQIFLDQNMLAVIDELMQALNFNSETVPQKSSLEEPDFYKTKIKLCILLHAFRIRAVTIDRVMSYLNAS

SEQ ID NO: 736 - protein, 107 aa, Homo sapiens; identical to SEQ ID NO: 192

SEQ ID NO: 737 - protein, 187 aa, Homo sapiens; identical to SEQ ID NO: 1

SEQ ID NO: 738 - protein, 159 aa, Homo sapiens [sequence omitted]

SEQ ID NO: 739 - protein, 327 aa, Homo sapiens; identical to SEQ ID NO: 195

SEQ ID NO: 740 - protein, 189 aa, Homo sapiens; identical to SEQ ID NO: 196

SEQ ID NO: 741 - protein, 260 aa, Homo sapiens; identical to SEQ ID NO: 197

SEQ ID NO: 742 - protein, 231 aa, Homo sapiens; identical to SEQ ID NO: 198

SEQ ID NO: 743 - protein, 133 aa, Homo sapiens [sequence omitted]

SEQ ID NO: 744 - protein, 415 aa, Homo sapiens
DEADRRLLRRCRLRLVEELQVDQLWDALLSRELFRPHMIEDIQRAGSGSRRDQARQLIIDLETRGSQALPLFISCLEDTGQDMLASFLRTNRQAAKLSKPTLENLTPVVLRPEIRKPEVLRPETPRPVDIGSGGFGDVGALESLRGNADLAYILSMEPCGHCLIINNVNFCRESGLRTRTGSNIDCEKLRRRFSSLHFMVEVKGDLTAKKMVLALLELAQQDHGALDCCVVVILSHGCQASHLQFPGAVYGTDGCPVSVEKIVNIFNGTSCPSLGGKPKLFFIQACGGEQKDHGFEVASTSPEDESPGSNPEPDATPFQEGLRTFDQLDAISSLPTPSDIFVSYSTFPGFVSWRDPKSGSWYVETLDDIFEQWAHSEDLQSLLLRVANAVSVKGIYKQMPGCFNFLRKKLFFKTS

SEQ ID NO: 745 - protein, 431 aa, Homo sapiens
MPNPRPGKPSAPSLALGPSPGASPSWRAAPKASDLLGARGPGGTFQGRDLRGGAHASSSSLNPMPPSQLQLPTLPLVMVAPSGARLGPLPHLQALLQDRPHFMHQLSTVDAHARTPVLQVHPLESPAMISLTPPTTATGVFSLKARPGLPPGINVASLEWVSREPALLCTFPNPSAPRKDSTLSAVPQSSYPLLANGVCKWPGCEKVFEEPEDFLKHCQADHLLDEKGRAQCLLQREMVQSLEQQLVLEKEKLSAMQAHLAGKMALTKASSVASSDKGSCCIVAAGSQGPVVPAWSGPREAPDSLFAVRRHLWGSHGNSTFPEFLHNMDYFKFHNMRPPFTYATLIRWAILEAPEKQRTLNEIYHWFTRMFAFFRNHPATWKNAIRHNLSLHKCFVRVESEKGAVWTVDELEFRKKRSQRPSRCSNPTPGP

SEQ ID NO: 746 - protein, 430 aa, Homo sapiens
PNPRPGKPSAPSLALGPSPGASPSWRAAPKASDLLGARGPGGTFQGRDLRGGAHASSSSLNPMPPSQLQLPTLPLVMVAPSGARLGPLPHLQALLQDRPHFMHQLSTVDAHARTPVLQVHPLESPAMISLTPPTTATGVFSLKARPGLPPGINVASLEWVSREPALLCTFPNPSAPRKDSTLSAVPQSSYPLLANGVCKWPGCEKVFEEPEDFLKHCQADHLLDEKGRAQCLLQREMVQSLEQQLVLEKEKLSAMQAHLAGKMALTKASSVASSDKGSCCIVAAGSQGPVVPAWSGPREAPDSLFAVRRHLWGSHGNSTFPEFLHNMDYFKFHNMRPPFTYATLIRWAILEAPEKQRTLNEIYHWFTRMFAFFRNHPATWKNAIRHNLSLHKCFVRVESEKGAVWTVDELEFRKKRSQRPSRCSNPTPGP

SEQ ID NO: 747 - protein, 396 aa, Homo sapiens
MPNPRPGKPSAPSLALGPSPGASPSWRAAPKASDLLGARGPGGTFQGRDLRGGAHASSSSLNPMPPSQLQLSTVDAHARTPVLQVHPLESPAMISLTPPTTATGVFSLKARPGLPPGINVASLEWVSREPALLCTFPNPSAPRKDSTLSAVPQSSYPLLANGVCKWPGCEKVFEEPEDFLKHCQADHLLDEKGRAQCLLQREMVQSLEQQLVLEKEKLSAMQAHLAGKMALTKASSVASSDKGSCCIVAAGSQGPVVPAWSGPREAPDSLFAVRRHLWGSHGNSTFPEFLHNMDYFKFHNMRPPFTYATLIRWAILEAPEKQRTLNEIYHWFTRMFAFFRNHPATWKNAIRHNLSLHKCFVRVESEKGAVWTVDELEFRKKRSQRPSRCSNPTPGP

SEQ ID NO: 748 - protein, 395 aa, Homo sapiens
PNPRPGKPSAPSLALGPSPGASPSWRAAPKASDLLGARGPGGTFQGRDLRGGAHASSSSLNPMPPSQLQLSTVDAHARTPVLQVHPLESPAMISLTPPTTATGVFSLKARPGLPPGINVASLEWVSREPALLCTFPNPSAPRKDSTLSAVPQSSYPLLANGVCKWPGCEKVFEEPEDFLKHCQADHLLDEKGRAQCLLQREMVQSLEQQLVLEKEKLSAMQAHLAGKMALTKASSVASSDKGSCCIVAAGSQGPVVPAWSGPREAPDSLFAVRRHLWGSHGNSTFPEFLHNMDYFKFHNMRPPFTYATLIRWAILEAPEKQRTLNEIYHWFTRMFAFFRNHPATWKNAIRHNLSLHKCFVRVESEKGAVWTVDELEFRKKRSQRPSRCSNPTPGP

SEQ ID NO: 749 - protein, 119 aa, synthetic construct
  REGION 1..119: note = Description of Artificial Sequence: Synthetic antibody variable domain
DVKLQESGPGLVAPSQSLSITCTVSGFSLTSYAVSWVRQPPGKGLEWLGIIWSGGATNYNSALKSRLSISKDNSKSQVFLKMNGLQTDDTARYYCAREHYYGSSAMDYWGQGASITVSS

SEQ ID NO: 750 - protein, 118 aa, synthetic construct
  REGION 1..118: note = Description of Artificial Sequence: Synthetic antibody variable domain
DVQLQESGPVLVKTGASVKMSCTASGYTFTDHFMDWVKQSHGKSLEWIGSLNPYSGGTSYNQKFKGKATLTVDKSSSTAYMELNSLTSVDSAVYYCARHNWGAYFDYWGQGTTLTVSS

SEQ ID NO: 751 - protein, 118 aa, synthetic construct; identical to SEQ ID NO: 750
  REGION 1..118: note = Description of Artificial Sequence: Synthetic antibody variable domain

SEQ ID NO: 752 - protein, 120 aa, synthetic construct
  REGION 1..120: note = Description of Artificial Sequence: Synthetic antibody variable domain
ALQLQQSGAELVRPGASVTLSCKASGYTFTDYEMHWVKQTPVHGLEWIGAIDPETGGTAYNQKFEGKAILTADKSSSTAYMELRSLTSEDSPVYYCARRRYYGSSSFDYWGQGTTLTVSS

SEQ ID NO: 753 - protein, 119 aa, synthetic construct
  REGION 1..119: note = Description of Artificial Sequence: Synthetic antibody variable domain
QVQLQQSGAEVKKPGSSVKVSCKASGFSLTSYAISWVRQAPGQGLEWMGGIIWSGGATNYAQKFQGRVTITADESTSTAYMELSSLRSEDTAVYYCAREHYYGSSAMDYWWGQGTMVTV

SEQ ID NO: 754 - protein, 119 aa, synthetic construct
  REGION 1..119: note = Description of Artificial Sequence: Synthetic antibody variable domain
QVQLQQSGAEVKKPGSSVKVSCKASGYAFSSYISWVRQAPGQGLEWMGGQIYPGDGDTNYAQKFQGRVTITADESTSTAYMELSSLRSEDTAVYYCVRYYYGSSGYFDYWWGQGTMVTV

SEQ ID NO: 755 - protein, 117 aa, synthetic construct
  REGION 1..117: note = Description of Artificial Sequence: Synthetic antibody variable domain
QVQLQQSGAEVKKPGSSVKVSCKASGYTFTDHFISWVRQAPGQGLEWMGGLNPYSGGTNYAQKFQGRVTITADESTSTAYMELSSLRSEDTAVYYCARHNWGAYFDYWWGQGTMVTV

SEQ ID NO: 756 - protein, 119 aa, synthetic construct
  REGION 1..119: note = Description of Artificial Sequence: Synthetic antibody variable domain
QVQLQQSGAEVKKPGSSVKVSCKASGYTFTDYEISWVRQAPGQGLEWMGGIDPETGGTNYAQKFQGRVTITADESTSTAYMELSSLRSEDTAVYYCARRRYYGSSSFDYWWGQGTMVTV

SEQ ID NO: 757 - protein, 112 aa, synthetic construct
  REGION 1..112: note = Description of Artificial Sequence: Synthetic antibody variable domain
GIVMTQSPLSLPVSLGDQASISCRSSQSIVHSYGNTYLFWYLQKPGQSPKLLIYRVSNRFSGVPDRFSGSGSGTNFTLKISRVEAEDMGVYYCFQGTHVPYTFGGGTKLEIK

SEQ ID NO: 758 - protein, 111 aa, synthetic construct
  REGION 1..111: note = Description of Artificial Sequence: Synthetic antibody variable domain
DVQMIQTPDSLAVSLGQRATISCRASESVDNYGISFMHWYQQKPGQSPKLLIYRASNLESGIPARFSGSGSRTDFTLTINPVETDDVATYYCQQNNKDPPTFGGGTKLEIK

SEQ ID NO: 759 - protein, 112 aa, synthetic construct
  REGION 1..112: note = Description of Artificial Sequence: Synthetic antibody variable domain
DIVMTQAAPSVPVTPGESVSISCRSSKSLLHSNGNTYLYWFLQRPGQSPQRLIYYMSNLASGVPDRFSGRGSGTDFTLRISRVEAEDVGVYYCMQGLEDPYTFGGGTKLEIK

SEQ ID NO: 760 - protein, 107 aa, synthetic construct
  REGION 1..107: note = Description of Artificial Sequence: Synthetic antibody variable domain
DVQMIQTPSSLSASLGDRVTISCRASQDIGNYLNWYQQKPDGTVKLLIYYTSRLHSGVPSRFSGSGSGTEYSLTISNLEQEDIATYFCQQGSALPPTFGGGTKLEIN

SEQ ID NO: 761 - protein, 112 aa, synthetic construct
  REGION 1..112: note = Description of Artificial Sequence: Synthetic antibody variable domain
EIVLTQSPATLSLSPGERATLSCRASQSIVHSYGNTYAWYQQKPGQAPRLLIYRVSRATGIPARFSGSGSGTDFTLTISSLEPEDFAVYYCFQGTHVPYTFFGQGTKLEIKR

SEQ ID NO: 762 - protein, 111 aa, synthetic construct
  REGION 1..111: note = Description of Artificial Sequence: Synthetic antibody variable domain
EIVLTQSPATLSLSPGERATLSCRASESVDNYGISFAWYQQKPGQAPRLLIYRASRATGIPARFSGSGSGTDFTLTISSLEPEDFAVYYCQQNNKDPPTFFGQGTKLEIKR

SEQ ID NO: 763 - protein, 112 aa, synthetic construct
  REGION 1..112: note = Description of Artificial Sequence: Synthetic antibody variable domain
EIVLTQSPATLSLSPGERATLSCRASKSLLHSNGNTYAWYQQKPGQAPRLLIYYMSRATGIPARFSGSGSGTDFTLTISSLEPEDFAVYYCMQGLEDPYTFFGQGTKLEIKR

SEQ ID NO: 764 - protein, 107 aa, synthetic construct
  REGION 1..107: note = Description of Artificial Sequence: Synthetic antibody variable domain
EIVLTQSPATLSLSPGERATLSCRASQDIGNYAWYQQKPGQAPRLLIYYTSRATGIPARFSGSGSGTDFTLTISSLEPEDFAVYYCQQGSALPPTFFGQGTKLEIKR

SEQ ID NO: 765 - protein, 246 aa, synthetic construct
  REGION 1..246: note = Description of Artificial Sequence: Synthetic small scFv sequence
DVKLQESGPGLVAPSQSLSITCTVSGFSLTSYAVSWVRQPPGKGLEWLGIIWSGGATNYNSALKSRLSISKDNSKSQVFLKMNGLQTDDTARYYCAREHYYGSSAMDYWGQGASITVSSGGGGSGGGGSGGGGSGIVMTQSPLSLPVSLGDQASISCRSSQSIVHSYGNTYLFWYLQKPGQSPKLLIYRVSNRFSGVPDRFSGSGSGTNFTLKISRVEAEDMGVYYCFQGTHVPYTFGGGTKLEIK

SEQ ID NO: 766 - protein, 246 aa, synthetic construct
  REGION 1..246: note = Description of Artificial Sequence: Synthetic small scFv sequence
QVQLQQSGAELVKPGASVKISCKASGYAFSSYWMNWVKQRPGKGLEWIGQIYPGDGDTTYNGKFKGKATLTADKSSSTVYMQLNSLTSEDSAVYFCVRYYYGSSGYFDYWGQGTTLTVSSGGGGSGGGGSGGGGSDVQMIQTPDSLAVSLGQRATISCRASESVDNYGISFMHWYQQKPGQSPKLLIYRASNLESGIPARFSGSGSRTDFTLTINPVETDDVATYYCQQNNKDPPTFGGGTKLEIK

SEQ ID NO: 767 - protein, 245 aa, synthetic construct
  REGION 1..245: note = Description of Artificial Sequence: Synthetic small scFv sequence
DVQLQESGPVLVKTGASVKMSCTASGYTFTDHFMDWVKQSHGKSLEWIGSLNPYSGGTSYNQKFKGKATLTVDKSSSTAYMELNSLTSVDSAVYYCARHNWGAYFDYWGQGTTLTVSSGGGGSGGGGSGGGGSDIVMTQAAPSVPVTPGESVSISCRSSKSLLHSNGNTYLYWFLQRPGQSPQRLIYYMSNLASGVPDRFSGRGSGTDFTLRISRVEAEDVGVYYCMQGLEDPYTFGGGTKLEIK

SEQ ID NO: 768 - protein, 242 aa, synthetic construct
  REGION 1..242: note = Description of Artificial Sequence: Synthetic small scFv sequence
ALQLQQSGAELVRPGASVTLSCKASGYTFTDYEMHWVKQTPVHGLEWIGAIDPETGGTAYNQKFEGKAILTADKSSSTAYMELRSLTSEDSPVYYCARRRYYGSSSFDYWGQGTTLTVSSGGGGSGGGGSGGGGSDVQMIQTPSSLSASLGDRVTISCRASQDIGNYLNWYQQKPDGTVKLLIYYTSRLHSGVPSRFSGSGSGTEYSLTISNLEQEDIATYFCQQGSALPPTFGGGTKLEIN

SEQ ID NO: 769 - protein, 248 aa, synthetic construct
  REGION 1..248: note = Description of Artificial Sequence: Synthetic small scFv sequence
QVQLQQSGAEVKKPGSSVKVSCKASGFSLTSYAISWVRQAPGQGLEWMGGIIWSGGATNYAQKFQGRVTITADESTSTAYMELSSLRSEDTAVYYCAREHYYGSSAMDYWWGQGTMVTVSSGGGGSGGGGSGGGGSEIVLTQSPATLSLSPGERATLSCRASQSIVHSYGNTYAWYQQKPGQAPRLLIYRVSRATGIPARFSGSGSGTDFTLTISSLEPEDFAVYYCFQGTHVPYTFFGQGTKLEIKR

SEQ ID NO: 770 - protein, 247 aa, synthetic construct
  REGION 1..247: note = Description of Artificial Sequence: Synthetic small scFv sequence
QVQLQQSGAEVKKPGSSVKVSCKASGYAFSSYISWVRQAPGQGLEWMGGQIYPGDGDTNYAQKFQGRVTITADESTSTAYMELSSLRSEDTAVYYCVRYYYGSSGYFDYWWGQGTMVTVSSGGGGSGGGGSGGGGSEIVLTQSPATLSLSPGERATLSCRASESVDNYGISFAWYQQKPGQAPRLLIYRASRATGIPARFSGSGSGTDFTLTISSLEPEDFAVYYCQQNNKDPPTFFGQGTKLEIKR

SEQ ID NO: 771 - protein, 246 aa, synthetic construct
  REGION 1..246: note = Description of Artificial Sequence: Synthetic small scFv sequence
QVQLQQSGAEVKKPGSSVKVSCKASGYTFTDHFISWVRQAPGQGLEWMGGLNPYSGGTNYAQKFQGRVTITADESTSTAYMELSSLRSEDTAVYYCARHNWGAYFDYWWGQGTMVTVSSGGGGSGGGGSGGGGSEIVLTQSPATLSLSPGERATLSCRASKSLLHSNGNTYAWYQQKPGQAPRLLIYYMSRATGIPARFSGSGSGTDFTLTISSLEPEDFAVYYCMQGLEDPYTFFGQGTKLEIKR

SEQ ID NO: 772 - protein, 243 aa, synthetic construct
  REGION 1..243: note = Description of Artificial Sequence: Synthetic small scFv sequence
QVQLQQSGAEVKKPGSSVKVSCKASGYTFTDYEISWVRQAPGQGLEWMGGIDPETGGTNYAQKFQGRVTITADESTSTAYMELSSLRSEDTAVYYCARRRYYGSSSFDYWWGQGTMVTVSSGGGGSGGGGSGGGGSEIVLTQSPATLSLSPGERATLSCRASQDIGNYAWYQQKPGQAPRLLIYYTSRATGIPARFSGSGSGTDFTLTISSLEPEDFAVYYCQQGSALPPTFFGQGTKLEIKR

SEQ ID NO: 773 - protein, 107 aa, synthetic construct
  REGION 1..107: note = Description of Artificial Sequence: Synthetic antibody variable domain
DIQMTQSPSSLSASVGDRVTITCRASQTIWSYLNWYQQRPGKAPNLLIYAASSLQSGVPSRFSGRGSGTDFTLTISSLQAEDFATYYCQQSYSIPQTFGQGTKLEIK

SEQ ID NO: 774 - protein, 108 aa, synthetic construct
  REGION 1..108: note = Description of Artificial Sequence: Synthetic antibody variable domain
DIQMTQTTSSLSASLGDRVTISCRASQDISNYLNWYQQKPDGTVKLLIYYTSILHSGVPSRFSGSGSGTDYSLTISNLEQEDFATYFCQQGNTLPWTFGGGTKLEIKA

SEQ ID NO: 775 - protein, 124 aa, synthetic construct
  REGION 1..124: note = Description of Artificial Sequence: Synthetic antibody variable domain
QVQLQQSGPGLVKPSQTLSLTCAISGDSVSSNSAAWNWIRQSPSRGLEWLGRTYYRSKWYNDYAVSVKSRITINPDTSKNQFSLQLNSVTPEDTAVYYCAREVTGDLEDAFDIWGQGTMVTVSS

SEQ ID NO: 776 - protein, 122 aa, synthetic construct
  REGION 1..122: note = Description of Artificial Sequence: Synthetic antibody variable domain
EVQLVESGGGLVKPGGSLKLSCAASGFAFSIYDMSWVRQTPEKRLEWVAYISSGGGTYYPDTVKGRFTISRDNAKNTLYLQMSSLKSEDTAMYYCARHSGYGTHWGVLFAYWGQGTLVTVSA

SEQ ID NO: 777 - protein, 122 aa, synthetic construct
  REGION 1..122: note = Description of Artificial Sequence: Synthetic antibody variable domain
EVQLVESGGGLVKPGGSLKLSCAASGFAFSIYDMSWVRQTPEKRLEWVAYISSGGGTYYPDTVKGRFTISRDNAKNTLYLQMSSLKSEDTAMYYCARHSGYGSSYGVLFAYWGQGTLVTVSA

SEQ ID NO: 778 - protein, 236 aa, synthetic construct
  REGION 1..236: note = Description of Artificial Sequence: Synthetic scFv sequence
QVQLQQSGPGLVKPSQTLSLTCAISGDSVSSNSAAWNWIRQSPSRGLEWLGRTYYRSKWYNDYAVSVKSRITINPDTSKNQFSLQLNSVTPEDTAVYYCAREVTGDLEDAFDIWGQGTMVTVSSGGGGSDIQMTQSPSSLSASVGDRVTITCRASQTIWSYLNWYQQRPGKAPNLLIYAASSLQSGVPSRFSGRGSGTDFTLTISSLQAEDFATYYCQQSYSIPQTFGQGTKLEIK

SEQ ID NO: 779 - protein, 245 aa, synthetic construct
  REGION 1..245: note = Description of Artificial Sequence: Synthetic scFv sequence
EVQLVESGGGLVKPGGSLKLSCAASGFAFSIYDMSWVRQTPEKRLEWVAYISSGGGTYYPDTVKGRFTISRDNAKNTLYLQMSSLKSEDTAMYYCARHSGYGTHWGVLFAYWGQGTLVTVSAGGGGSGGGGSGGGGSDIQMTQTTSSLSASLGDRVTISCRASQDISNYLNWYQQKPDGTVKLLIYYTSILHSGVPSRFSGSGSGTDYSLTISNLEQEDFATYFCQQGNTLPWTFGGGTKLEIKA

SEQ ID NO: 780 - protein, 245 aa, synthetic construct
  REGION 1..245: note = Description of Artificial Sequence: Synthetic scFv sequence
EVQLVESGGGLVKPGGSLKLSCAASGFAFSIYDMSWVRQTPEKRLEWVAYISSGGGTYYPDTVKGRFTISRDNAKNTLYLQMSSLKSEDTAMYYCARHSGYGSSYGVLFAYWGQGTLVTVSAGGGGSGGGGSGGGGSDIQMTQTTSSLSASLGDRVTISCRASQDISNYLNWYQQKPDGTVKLLIYYTSILHSGVPSRFSGSGSGTDYSLTISNLEQEDFATYFCQQGNTLPWTFGGGTKLEIKA

SEQ ID NO: 781 - protein, 120 aa, Mus musculus
EVQLVESGGGLVQPGGSLRLSCAASGFTFSSFGMHWVRQAPGKGLEWVAYISSDSSAIYYADTVKGRFTISRDNAKNSLYLQMNSLRDEDTAVYYCGRGRENIYYGSRLDYWGQGTTVTV

SEQ ID NO: 782 - protein, 119 aa, synthetic construct
  REGION 1..119: note = Description of Artificial Sequence: Synthetic antibody variable domain
QVQLQQSGAEVKKPGSSVKVSCKASGGTFSSYAISWVRQAPGQGLEWMGGIIPILGIANYAQKFQGRVTITADESTSTAYMELSSLRSEDTAVYYCATGGSGRYALDIWGQGTMVTVSS

SEQ ID NO: 783 - protein, 122 aa, synthetic construct
  REGION 1..122: note = Description of Artificial Sequence: Synthetic antibody variable domain
QVQLQQSGAEVKKPGSSVKVSCKASGGTFSSYAISWVRQAPGQGLEWMGGIIPILGIANYAQKFQGRVTITADESTSTAYMELSSLRSEDTAVYYCARGGAGGSGSYYPLIWGQGTTVTVSS

SEQ ID NO: 784 - protein, 117 aa, synthetic construct
  REGION 1..117: note = Description of Artificial Sequence: Synthetic antibody variable domain
QVQLVQSGAEVKKPGSSVKVSCKASGGTFSSYAISWVRQAPGQGLEWMGGIIPILGTANYAQKFQGRVTITADESTSTAYMELSSLRSEDTAVYYCARWGGGAFDIWGQGTMVTVSS

SEQ ID NO: 785 - protein, 107 aa, Mus musculus
DIQLTQSPSFLSASVGDRVTITCKASQNVDTNVAWYQQKPGKAPKALIYSASYRYSGVPSRFSGSGSGTDFTLTISSLQPEDFATYYCQQYNNYPFTFGQGTKLEIK

SEQ ID NO: 786 - protein, 109 aa, synthetic construct
  REGION 1..109: note = Description of Artificial Sequence: Synthetic antibody variable domain
EIVLTQSPATLSLSPGERATLSCRASQSVSSYLAWYQQKPGQAPRLLIYDASNRATGIPARFSGSGSGTDFTLTISSLEPEDFAVYYCQQRSNWPPSYTFGQGTKLEIK

SEQ ID NO: 787 - protein, 110 aa, synthetic construct
  REGION 1..110: note = Description of Artificial Sequence: Synthetic antibody variable domain
EIVLTQSPATLSLSPGERATLSCGASQSVSSSYLAWYQQKPGQAPRLLIYDASSRATGIPARFSGSGSGTDFTLTISSLEPEDFAVYYCQQRSSWPPTWTFGQGTKLEIK

SEQ ID NO: 788 - protein, 109 aa, synthetic construct
  REGION 1..109: note = Description of Artificial Sequence: Synthetic antibody variable domain
EIVLTQSPGTLSLSPGERATLSCRASQSVGGYLAWYQQKPGQAPRLLIYDASNRATGIPARFSGSGSGTDFTLTISSLEPEDFAVYYCQQRNNWPPMYTFGQGTKLEIK

SEQ ID NO: 789 - protein, 244 aa, synthetic construct
  REGION 1..244: note = Description of Artificial Sequence: Synthetic scFv sequence
EVQLVESGGGLVQPGGSLRLSCAASGFTFSSFGMHWVRQAPGKGLEWVAYISSDSSAIYYADTVKGRFTISRDNAKNSLYLQMNSLRDEDTAVYYCGRGRENIYYGSRLDYWGQGTTVTVSSGGGGSGGGGSGGGGSDIQLTQSPSFLSASVGDRVTITCKASQNVDTNVAWYQQKPGKAPKALIYSASYRYSGVPSRFSGSGSGTDFTLTISSLQPEDFATYYCQQYNNYPFTFGQGTKLEIK

SEQ ID NO: 790 - protein, 244 aa, synthetic construct
  REGION 1..244: note = Description of Artificial Sequence: Synthetic scFv sequence
QVQLQQSGAEVKKPGSSVKVSCKASGGTFSSYAISWVRQAPGQGLEWMGGIIPILGIANYAQKFQGRVTITADESTSTAYMELSSLRSEDTAVYYCATGGSGRYALDIWGQGTMVTVSSGGGGSGGGGSGGGGSEIVLTQSPATLSLSPGERATLSCRASQSVSSYLAWYQQKPGQAPRLLIYDASNRATGIPARFSGSGSGTDFTLTISSLEPEDFAVYYCQQRSNWPPSYTFGQGTKLEIKR

SEQ ID NO: 791 - protein, 248 aa, synthetic construct
  REGION 1..248: note = Description of Artificial Sequence: Synthetic scFv sequence
QVQLQQSGAEVKKPGSSVKVSCKASGGTFSSYAISWVRQAPGQGLEWMGGIIPILGIANYAQKFQGRVTITADESTSTAYMELSSLRSEDTAVYYCARGGAGGSGSYYPLIWGQGTTVTVSSGGGGSGGGGSGGGGSEIVLTQSPATLSLSPGERATLSCGASQSVSSSYLAWYQQKPGQAPRLLIYDASSRATGIPARFSGSGSGTDFTLTISSLEPEDFAVYYCQQRSSWPPTWTFGQGTKLEIKR

SEQ ID NO: 792 - protein, 242 aa, synthetic construct
  REGION 1..242: note = Description of Artificial Sequence: Synthetic scFv sequence
QVQLVQSGAEVKKPGSSVKVSCKASGGTFSSYAISWVRQAPGQGLEWMGGIIPILGTANYAQKFQGRVTITADESTSTAYMELSSLRSEDTAVYYCARWGGGAFDIWGQGTMVTVSSGGGGSGGGGSGGGGSEIVLTQSPGTLSLSPGERATLSCRASQSVGGYLAWYQQKPGQAPRLLIYDASNRATGIPARFSGSGSGTDFTLTISSLEPEDFAVYYCQQRNNWPPMYTFGQGTKLEIKR

SEQ ID NO: 793 - protein, 449 aa, synthetic construct
  REGION 1..449: note = Description of Artificial Sequence: Synthetic antibody variable domain
QVQLKESGPGLVAPSQSLSITCTVSGFSVTNYGVHWVRQPPGKGLEWLGVIWAGGITNYNSAFMSRLSISKDNSKSQVFLKMNSLQIDDTAMYYCASRGGHYGYALDYWGQGTSVTVSSASTKGPSVFPLAPSSKSTSGGTAALGCLVKDYFPEPVTVSWNSGALTSGVHTFPAVLQSSGLYSLSSVVTVPSSSLGTQTYICNVNHKPSNTKVDKRVEPKSCDKTHTCPPCPAPELLGGPSVFLFPPKPKDTLMISRTPEVTCVVVDVSHEDPEVKFNWYVDGVEVHNAKTKPREEQYNSTYRVVSVLTVLHQDWLNGKEYKCKVSNKALPAPIEKTISKAKGQPREPQVYTLPPSRDELTKNQVSLTCLVKGFYPSDIAVEWESNGQPENNYKTTPPVLDSDGSFFLYSKLTVDKSRWQQGNVFSCSVMHEALHNHYTQKSLSLSPGK

SEQ ID NO: 794 - protein, 211 aa, synthetic construct
  REGION 1..211: note = Description of Artificial Sequence: Synthetic antibody variable domain
SIVMTQTPKFLLVSAGDRVTITCKASQSVSNDVTWYQQKAGQSPKLLIYSASNRYSGVPDRFTGSGYGTAFTFTISTVQAEDLAVYFCQQDYSSFGGGTKLEIKRTVAAPSVFIFPPSDEQLKSGTASVVCLLNNFYPREAKVQWKVDNALQSGNSQESVTEQDSKDSTYSLSSTLTLSKADYEKHKVYACEVTHQGLSSPVTKSFNRGEC

SEQ ID NO: 795 - protein, 446 aa, synthetic construct
  REGION 1..446: note = Description of Artificial Sequence: Synthetic antibody variable domain
QVQLKESGPGLVAPSQSLSITCTVSGFSVTNYGVHWVRQPPGKGLEWLGVIWAGGITNYNSAFMSRLSISKDNSKSQVFLKMNSLQIDDTAMYYCASRGGHYGYALDYWGQGTSVTVSSASTKGPSVFPLAPCSRSTSESTAALGCLVKDYFPEPVTVSWNSGALTSGVHTFPAVLQSSGLYSLSSVVTVPSSSLGTKTYTCNVDHKPSNTKVDKRVESKYGPPCPSCPAPEFLGGPSVFLFPPKPKDTLMISRTPEVTCVVVDVSQEDPEVQFNWYVDGVEVHNAKTKPREEQFNSTYRVVSVLTVLHQDWLNGKEYKCKVSNKGLPSSIEKTISKAKGQPREPQVYTLPPSQEEMTKNQVSLTCLVKGFYPSDIAVEWESNGQPENNYKTTPPVLDSDGSFFLYSRLTVDKSRWQEGNVFSCSVMHEALHNHYTQKSLSLSLGK

SEQ ID NO: 796 - protein, 448 aa, synthetic construct
  REGION 1..448: note = Description of Artificial Sequence: Synthetic antibody variable domain
QVQLVESGPGVVQPGRSLRISCAVSGFSVTNYGVHWVRQPPGKGLEWLGVIWAGGITNYNSAFMSRLTISKDNSKNTVYLQMNSLRAEDTAMYYCASRGGHYGYALDYWGQGTLVTVSSASTKGPSVFPLAPSSKSTSGGTAALGCLVKDYFPEPVTVSWNSGALTSGVHTFPAVLQSSGLYSLSSVVTVPSSSLGTQTYICNVNHKPSNTKVDKRVEPKSCDKTHTCPPCPAPELLGGPSVFLFPPKPKDTLMISRTPEVTCVVVDVSHEDPEVKFNWYVDGVEVHNAKTKPREEQYNSTYRVVSVLTVLHQDWLNGKEYKCKVSNKALPAPIEKTISKAKGQPREPQVYTLPPSRDELTKNQVSLTCLVKGFYPSDIAVEWESNGQPENNYKTTPPVLDSDGSFFLYSKLTVDKSRWQQGNVFSCSVMHEALHNHYTQKSLSLSPG

SEQ ID NO: 797 - protein, 211 aa, synthetic construct
  REGION 1..211: note = Description of Artificial Sequence: Synthetic antibody variable domain
EIVMTQTPATLSVSAGERVTITCKASGSVSNDVTWYQQKPGQAPRLLIYSASNRYSGVPARFSGSGYGTEFTFTISSVQSEDFAVYFCGGDYSSFGQGTKLEIKRTVAAPSVFIFPPSDEQLKSGTASVVCLLNNFYPREAKVQWKVDNALQSGNSQESVTEQDSKDSTYSLSSTLTLSKADYEKHKVYACEVTHQGLSSPVTKSFNRGEC

SEQ ID NO: 798 - protein, 448 aa, synthetic construct
  REGION 1..448: note = Description of Artificial Sequence: Synthetic antibody variable domain
QVQLKESGPGVVQPGQSLSISCAVSGFSVTNYGVHWVRQPPGKGLEWLGVIWAGGITNYNSAFMSRLTISKDNSKSTVYLKMNSLQAEDTAMYYCASRGGHYGYALDYWGQGTLVTVSSASTKGPSVFPLAPSSKSTSGGTAALGCLVKDYFPEPVTVSWNSGALTSGVHTFPAVLQSSGLYSLSSVVTVPSSSLGTQTYICNVNHKPSNTKVDKRVEPKSCDKTHTCPPCPAPELLGGPSVFLFPPKPKDTLMISRTPEVTCVVVDVSHEDPEVKFNWYVDGVEVHNAKTKPREEQYNSTYRVVSVLTVLHQDWLNGKEYKCKVSNKALPAPIEKTISKAKGQPREPQVYTLPPSRDELTKNQVSLTCLVKGFYPSDIAVEWESNGQPENNYKTTPPVLDSDGSFFLYSKLTVDKSRWQQGNVFSCSVMHEALHNHYTQKSLSLSPG

SEQ ID NO: 799 - protein, 211 aa, synthetic construct
  REGION 1..211: note = Description of Artificial Sequence: Synthetic antibody variable domain
SIVMTQTPKTLSVSAGERVTITCKASQSVSNDVTWYQQKPGQSPKLLIYSASNRYSGVPDRFSGSGYGTAFTFTISSVQAEDFAVYFCQQDYSSFGQGTKLEIKRTVAAPSVFIFPPSDEQLKSGTASVVCLLNNFYPREAKVQWKVDNALQSGNSQESVTEQDSKDSTYSLSSTLTLSKADYEKHKVYACEVTHQGLSSPVTKSFNRGEC

SEQ ID NO: 800 - protein, 446 aa, synthetic construct
  REGION 1..446: note = Description of Artificial Sequence: Synthetic antibody variable domain
QVQLVESGPGVVQPGRSLRISCAVSGFSVTNYGVHWVRQPPGKGLEWLGVIWAGGITNYNSAFMSRLTISKDNSKNTVYLQMNSLRAEDTAMYYCASRGGHYGYALDYWGQGTLVTVSSASTKGPSVFPLAPCSRSTSESTAALGCLVKDYFPEPVTVSWNSGALTSGVHTFPAVLQSSGLYSLSSVVTVPSSSLGTKTYTCNVDHKPSNTKVDKRVESKYGPPCPSCPAPEFLGGPSVFLFPPKPKDTLMISRTPEVTCVVVDVSQEDPEVQFNWYVDGVEVHNAKTKPREEQFNSTYRVVSVLTVLHQDWLNGKEYKCKVSNKGLPSSIEKTISKAKGQPREPQVYTLPPSQEEMTKNQVSLTCLVKGFYPSDIAVEWESNGQPENNYKTTPPVLDSDGSFFLYSRLTVDKSRWQEGNVFSCSVMHEALHNHYTQKSLSLSLGK

SEQ ID NO: 801 - protein, 105 aa, Homo sapiens
EVQLVESGGGLVQPGGSLRLSCAASGFTVSGSYMSWVRQAPGKGLEWVSVIYSGGSTYYADSVKGRFTISRDNSKNTLYLQMNSLRAEDTAVYYCARDLRGSYDY

SEQ ID NO: 802 - protein, 102 aa, Homo sapiens
EIVLTQSPLSLPVTLGQPASISCRSSQSLVYSDGNTYLNWFQQRPGQSPRRLIYKVSNRDSGVPDRFSGSGSGTDFTLKISRVEAEDVGVYYCMQGTHWPRT

SEQ ID NO: 803 - protein, 449 aa, synthetic construct; identical to SEQ ID NO: 793
  REGION 1..449: note = Description of Artificial Sequence: Synthetic antibody variable domain

SEQ ID NO: 804 - protein, 211 aa, synthetic construct; identical to SEQ ID NO: 794
  REGION 1..211: note = Description of Artificial Sequence: Synthetic antibody variable domain

SEQ ID NO: 805 - protein, 449 aa, synthetic construct
  REGION 1..449: note = Description of Artificial Sequence: Synthetic antibody variable domain
QVQLVESGPGVVQPGRSLRISCAVSGFSVTNYGVHWVRQPPGKGLEWLGVIWAGGITNYNSAFMSRLTISKDNSKNTVYLQMNSLRAEDTAMYYCASRGGHYGYALDYWGQGTLVTVSSASTKGPSVFPLAPSSKSTSGGTAALGCLVKDYFPEPVTVSWNSGALTSGVHTFPAVLQSSGLYSLSSVVTVPSSSLGTQTYICNVNHKPSNTKVDKRVEPKSCDKTHTCPPCPAPELLGGPSVFLFPPKPKDTLMISRTPEVTCVVVDVSHEDPEVKFNWYVDGVEVHNAKTKPREEQYNSTYRVVSVLTVLHQDWLNGKEYKCKVSNKALPAPIEKTISKAKGQPREPQVYTLPPSRDELTKNQVSLTCLVKGFYPSDIAVEWESNGQPENNYKTTPPVLDSDGSFFLYSKLTVDKSRWQQGNVFSCSVMHEALHNHYTQKSLSLSPGK

SEQ ID NO: 806 - protein, 211 aa, synthetic construct
  REGION 1..211: note = Description of Artificial Sequence: Synthetic antibody variable domain
EIVMTQTPATLSVSAGERVTITCKASQSVSNDVTWYQQKPGQAPRLLIYSASNRYSGVPARFSGSGYGTEFTFTISSVQSEDFAVYFCQQDYSSFGQGTKLEIKRTVAAPSVFIFPPSDEQLKSGTASVVCLLNNFYPREAKVQWKVDNALQSGNSQESVTEQDSKDSTYSLSSTLTLSKADYEKHKVYACEVTHQGLSSPVTKSFNRGEC

SEQ ID NO: 807 - protein, 446 aa, synthetic construct; identical to SEQ ID NO: 795
  REGION 1..446: note = Description of Artificial Sequence: Synthetic antibody variable domain

SEQ ID NO: 808 - protein, 446 aa, synthetic construct; identical to SEQ ID NO: 800
  REGION 1..446: note = Description of Artificial Sequence: Synthetic antibody variable domain

SEQ ID NO: 809 - protein, 119 aa, synthetic construct
  REGION 1..119: note = Description of Artificial Sequence: Synthetic antibody variable domain
QVQLVESGPGVVQPGRSLRISCAVSGFSVTNYGVHWVRQPPGKGLEWLGVIWAGGITNYNSAFMSRLTISKDNSKNTVYLQMNSLRAEDTAMYYCASRGGHYGYALDYWGQGTLVTVSS

SEQ ID NO: 810 - protein, 104 aa, synthetic construct
  REGION 1..104: note = Description of Artificial Sequence: Synthetic antibody variable domain
EIVMTQTPATLSVSAGERVTITCKASQSVSNDVTWYQQKPGQAPRLLIYSASNRYSGVPARFSGSGYGTEFTFTISSVQSEDFAVYFCQQDYSSFGQGTKLEIK

SEQ ID NO: 811 - protein, 118 aa, synthetic construct
  REGION 1..118: note = Description of Artificial Sequence: Synthetic antibody variable domain
QVQLKESGPVLVAPSQTLSITCTVSGFSLASYNIHWVRQPPGKGLEWLGVIWAGGSTNYNSALMSRLSISKDNSKSQVFLQMNSLQTDDTAMYYCAKRSDDYSWFAYWGQGTLVTVSA

SEQ ID NO: 812 - protein, 118 aa, synthetic construct
  REGION 1..118: note = Description of Artificial Sequence: Synthetic antibody variable domain
QVQLQESGPGLVKPSQTLSITCTVSGFSLASYNIHWVRQPPGKGLEWLGVIWAGGSTNYNSALMSRLTISKDNSKNQVFLKMSSLTAADTAVYYCAKRSDDYSWFAYWGQGTLVTVSS

SEQ ID NO: 813 - protein, 108 aa, synthetic construct
  REGION 1..108: note = Description of Artificial Sequence: Synthetic antibody variable domain
ENVLTQSPAIMSASPGEKVTMTCRASSSVSSSYLHWYQQKSGASPKVWIYSTSNLASGVPGRFSGSGSGTSYSLTISSVEAEDAATYYCQQYSGYPITFGAGTKVEVK

SEQ ID NO: 814 - protein, 108 aa, synthetic construct
  REGION 1..108: note = Description of Artificial Sequence: Synthetic antibody variable domain
ENQMTQSPSSLSASVGDRVTMTCRASSSVSSSYLHWYQQKSGKAPKVWIYSTSNLASGVPSRFSGSGSGTDYTLTISSLQPEDFATYYCQQYSGYPITFGQGTKVEIK

SEQ ID NO: 815 - protein, 113 aa, synthetic construct
  REGION 1..113: note = Description of Artificial Sequence: Synthetic antibody variable domain
DVVMTQTPLSLPVTPGEPASISCRSSQSLVHRNGNTYLHWYLQKPGQSPKLLIHKVSNRFSGVPDRFSGSGSGTDFTLKISRVEAEDLGVYFCSQSTHVPPLTFGAGTKLELK

SEQ ID NO: 816 - protein, 113 aa, synthetic construct
  REGION 1..113: note = Description of Artificial Sequence: Synthetic antibody variable domain
EVQLVQSGAEVEKPGASVKISCKASGSSFTGYNMNWVRQNIGKSLEWIGAIDPYYGGTSYNQKFKGRATLTVDKSTSTAYMHLKSLRSEDTAVYYCVSGMEYWGQGTSVTVSS

SEQ ID NO: 817 - protein, 118 aa, synthetic construct; identical to SEQ ID NO: 811
  REGION 1..118: note = Description of Artificial Sequence: Synthetic antibody variable domain

SEQ ID NO: 818 - protein, 118 aa, synthetic construct; identical to SEQ ID NO: 812
  REGION 1..118: note = Description of Artificial Sequence: Synthetic antibody variable domain

SEQ ID NO: 819 - protein, 108 aa, synthetic construct; identical to SEQ ID NO: 813
  REGION 1..108: note = Description of Artificial Sequence: Synthetic antibody variable domain

SEQ ID NO: 820 - protein, 108 aa, synthetic construct; identical to SEQ ID NO: 814
  REGION 1..108: note = Description of Artificial Sequence: Synthetic antibody variable domain

SEQ ID NO: 821 - protein, 240 aa, synthetic construct
  REGION 1..240: note = Description of Artificial Sequence: Synthetic antibody variable domain
MEAPAQLLFLLLLWLPDTTGEIVMTQSPATLSVSPGERATLSCRSSQSLVHRNGNTYLHWYLQKPGQSPKLLIHKVSNRFSGVPDRFSGSGSGTDFTLKISRVEAEDLGVYFCSQSTHVPPLTFGAGTKLELKRTVAAPSVFIFPPSDEQLKSGTASVVCLLNNFYPREAKVQWKVDNALQSGNSQESVTEQDSKDSTYSLSSTLTLSKADYEKHKVYACEVTHQGLSSPVTKSFNRGEC

SEQ ID NO: 822 - protein, 462 aa, synthetic construct
  REGION 1..462: note = Description of Artificial Sequence: Synthetic antibody variable domain
MGWTWIFILILSVTTGVHSEVQLLQSGPELEKPGASVMISCKASGSSFTGYNMNWVRQNIGKSLEWIGAIDPYYGGTSYNQKFKGRATLTVDKSSSTAYMHLKSLTSEDSAVYYCVSGMEYWGQGTSVTVSSASTKGPSVFPLAPSSKSTSGGTAALGCLVKDYFPEPVTVSWNSGALTSGVHTFPAVLQSSGLYSLSSVVTVPSSSLGTQTYICNVNHKPSNTKVDKRVEPKSCDKTHTCPPCPAPELLGGPSVFLFPPKPKDTLMISRTPEVTCVVVDVSHEDPEVKFNWYVDGVEVHNAKTKPREEQYNSTYRVVSVLTVLHQDWLNGKEYKCKVSNKALPAPIEKTISKAKGQPREPQVYTLPPSREEMTKNQVSLTCLVKGFYPSDIAVEWESNGQPENNYKTTPPVLDSDGSFFLYSKLTVDKSRWQQGNVFSCSVMHEALHNHYTQKSLSLSPGK

SEQ ID NO: 823 - protein, 120 aa, synthetic construct
  REGION 1..120: note = Description of Artificial Sequence: Synthetic antibody variable domain
QVQLVESGAEVKKPGASVKVSCKASGYTFTSYAIHWVRQAPGQRLEWMGWINAGNGYRKYSQKFQGRVTVTRDTSASTAYMELSSLRSEDTAVYYCARFEGGMVTAMDFWGQGTLVTVSS

SEQ ID NO: 824 - protein, 112 aa, synthetic construct
  REGION 1..112: note = Description of Artificial Sequence: Synthetic antibody variable domain
DVVMTQSPLSLPVTPGEPASISCRSSQSLLHRNGYNYLDWYLQKPGQSPQLLIYLGSNRASGVPDRFSGSGSGTDFTLKISRVEAEDVGVYYCMQALQTPFTFGPGTKVDIK

SEQ ID NO: 825 - protein, 120 aa, synthetic construct
  REGION 1..120: note = Description of Artificial Sequence: Synthetic antibody variable domain
EVQLLESGAEVKKPGASVKVSCKASGYTFTSYAIHWVRQAPGQRLEWMGWINAGNGYRKYSQKFQGRVTVTRDTSASTAYMELSSLRSEDTAVYYCARFEGGMVTAMDYWGQGTLVTVSS

SEQ ID NO: 826 - protein, 112 aa, synthetic construct
  REGION 1..112: note = Description of Artificial Sequence: Synthetic antibody variable domain
DIQVTQSPLSLPVTPGEPASISCRSSQSLLHSNGYNYLDWYLQKPGQSPQLLIYLGSNRASGVPDRFSGSGSGTDFTLKISRVEAEDVGVYYCMQALQTPFTFGPGIKVDIK

SEQ ID NO: 827 - protein, 119 aa, synthetic construct
  REGION 1..119: note = Description of Artificial Sequence: Synthetic antibody variable domain
QVQLVESGAEVKKPGASVKMSCRASGYTFTRYYMHWVRQAPGQGLEWMGIINPSAGSTSYAQKFQDRVTMTRDTSRSTVYMELSSLRSEDTAVYYCARRVVVGGPFDFWGQGTLVTVSS

SEQ ID NO: 828 - protein, 113 aa, synthetic construct
  REGION 1..113: note = Description of Artificial Sequence: Synthetic antibody variable domain
DIQMTQSPDSLAVSLGERATINCKSSQSVLYSPNKKNYLAWYQQKPGQPPSLLFYWASTRESGVPDRFSGSGSGTDFTLTISSLQAEDVAVYYCQQYYSTPPTFGQGTKVEIK

SEQ ID NO: 829 - protein, 119 aa, synthetic construct
  REGION 1..119: note = Description of Artificial Sequence: Synthetic antibody variable domain
QVQLVESGAEVKKPGASVRVSCKASGYRFISYYMHWVRQAPGQGLEWMGIINPSGGSTSYAQKFQGRVTMTRDTSTSTIYMELSSLRSEDTAVYYCARRNIVTGPFDYWGQGTLVTVSS

SEQ ID NO: 830 - protein, 113 aa, synthetic construct
  REGION 1..113: note = Description of Artificial Sequence: Synthetic antibody variable domain
DVVMTQTPDSLAVSLGERATINCKSSQSVLYISNNKNYLAWYQQKPGQPPKLLIYWASTRESGVPDRFSGSGSGTDFTLTISSLQAEDVAVYYCQHYYSTPPTFGQGTKLEIK

SEQ ID NO: 831 - protein, 119 aa, synthetic construct
  REGION 1..119: note = Description of Artificial Sequence: Synthetic antibody variable domain
QVQLVESGAEVKKPGASVKVSCKASGYTFARYYMHWVRQAPGQGPEWMGIINPSGGSTSYAQKFQGRVTVTRDTSTSTVYMELSSLRSEDTAVYYCARRVVLGGPFDYWGQGTLVTVSS

SEQ ID NO: 832 - protein, 113 aa, synthetic construct
  REGION 1..113: note = Description of Artificial Sequence: Synthetic antibody variable domain
DIRVTQSPDSLAVSLGERATINCKSSQSVLYSSNNKNYLAWYQQKPGQPPKLLIYWASTRESGVPDRFSGSGSGTDFTLTISSLQAEDVAVYYCQQYYSTPPTFGQGTKVEIK

SEQ ID NO: 833 - protein, 119 aa, synthetic construct
  REGION 1..119: note = Description of Artificial Sequence: Synthetic antibody variable domain
EVQLLESGAEVKKPGASVKVSCKASGYTFTRYYMHWVRQAPGQGLEWMGIINPSSGSTSYAQKFQGRVTMTRDTSTSTVYMELSSLRSEDMAVYYCARRVVVGGPFDYWGQGTLVTVSS

SEQ ID NO: 834 - protein, 113 aa, synthetic construct
  REGION 1..113: note = Description of Artificial Sequence: Synthetic antibody variable domain
DIQLTQSPDSLAVSLGERATINCKSSQSILYSSNNKNYLAWYQQKPGQPPKLLIYWASTRESGVPDRFSGSGSGTDFTLTISSLQAEDVAVYYCQQYYSTPPTFGQGTKVEIK

SEQ ID NO: 835 - protein, 120 aa, synthetic construct
  REGION 1..120: note = Description of Artificial Sequence: Synthetic antibody variable domain
EVQLLESGAEVKKPGASVKVSCKASGYIFSRYAIHWVRQAPGQGLEWMGWINPFNGFTKYSQKFQGRVALTRDRSATTGYMELSSLTSEDTAVYYCARLESNKFYAFDIWGQGTMVTVSS

SEQ ID NO: 836 - protein, 112 aa, synthetic construct
  REGION 1..112: note = Description of Artificial Sequence: Synthetic antibody variable domain
EIVMTQSPLSLPVTPGEPASISCTSSQSLLHSNGYNYLDWYLQKPGQSPQLLIYLGSNRASGVPDRFSGSGSGTDFTLKISTVEAEDVGVYYCMQALQTPWTFGQGTKVEIK

SEQ ID NO: 837 - protein, 120 aa, synthetic construct
  REGION 1..120: note = Description of Artificial Sequence: Synthetic antibody variable domain
QVQLLESGAEVKKPGASVKVSCKASGYTFTSYAMHWVRQAPGQRLEWMGWINAGNGNTIYSQKFQARVTITRDTSASTAYMELSSLRSEDTAVYYCARWVGGVASYFDYWGQGTLVTVSS

SEQ ID NO: 838 - protein, 112 aa, synthetic construct
  REGION 1..112: note = Description of Artificial Sequence: Synthetic antibody variable domain
EIVLTQSPLSLSVTPGEPASISCRSSQSLLHRNGYNYFDWYLQQPGQSPQLLIYLGSNRASGVPDRFSGSGSGTDFTLKISRVEAEDVGVYYCMQALQTPYTFGQGTKLEIK

SEQ ID NO: 839 - protein, 121 aa, synthetic construct
  REGION 1..121: note = Description of Artificial Sequence: Synthetic antibody variable domain
QVQLLESGAEVKKPGASVKVSCEASGYTFTSSDINWVRQATGQGLEWMGWMNPNSGNTGYAQKFQGRVTMTRNTSISTAYMELSSLRSEDTAVYYCARERPRRRGGGFDIWGQGTMVTVSS

SEQ ID NO: 840 - protein, 121 aa, synthetic construct
  REGION 1..121: note = Description of Artificial Sequence: Synthetic antibody variable domain
QVQLQQSGAEVKKPGASVKVSCEASGYTFTSSDINWVRQATGQGLEWMGWMNPKSGNTGYAQKFQGRVTMTRNTSISTAYMELSSLRSEDTAVYYCARERPRRRGGGFDIWGQGTMVTVSS

SEQ ID NO: 841 - protein, 108 aa, synthetic construct
  REGION 1..108: note = Description of Artificial Sequence: Synthetic antibody variable domain
DIRMTQSPSSLSASVGDRVTITCRASQGISNYLAWYQQKPGKVPKFLIYAASTLQSGVPSRFSGSGSGTDFTLTISSLQPEDVATYYCQKYNSAPWTFGQGTKVEIKN

SEQ ID NO: 842 - protein, 119 aa, synthetic construct
  REGION 1..119: note = Description of Artificial Sequence: Synthetic antibody variable domain
QVQLVESGAEVKKPGASVKVSCKASGYTFTNYYMHWVRQAPGQGLEWMGIINPSRGSTSYAQKFQGRVTMTRDTSTSTVYMELSSLRSEDTAVYYCARRQMATGPFDYWGQGTLVTVSS

SEQ ID NO: 843 - protein, 113 aa, synthetic construct
  REGION 1..113: note = Description of Artificial Sequence: Synthetic antibody variable domain
DIVLTQSPDSLAVSLGERATINCKSSQSVLYSSNNKNYLAWYQQKPGQPPKLLIYWASTRESGVPDRFSGSGSGTDFTLTISSLQAEDVAVYYCQQYYSTPPTFGQGTKLEIK

SEQ ID NO: 844 - protein, 240 aa, synthetic construct; identical to SEQ ID NO: 821
  REGION 1..240: note = Description of Artificial Sequence: Synthetic antibody variable domain

SEQ ID NO: 845 - protein, 462 aa, synthetic construct; identical to SEQ ID NO: 822
  REGION 1..462: note = Description of Artificial Sequence: Synthetic antibody variable domain

SEQ ID NO: 846 - protein, 239 aa, synthetic construct
  REGION 1..239: note = Description of Artificial Sequence: Synthetic antibody variable domain
MKLPVRLLVLMFWIPASLSDVVMTQTPLSLPVTPGEPASISCRSSQSLVHRNGNTYLHWYLQKPGQSPKLLIHKVSNRFSGVPDRFSGSGSGTDFTLKISRVEAEDLGVYFCSQSTHVPPLTFGAGTKLELKRTVAAPSVFIFPPSDEQLKSGTASVVCLLNNFYPREAKVQWKVDNALQSGNSQESVTEQDSKDSTYSLSSTLTLSKADYEKHKVYACEVTHQGLSSPVTKSFNRGEC

SEQ ID NO: 847 - protein, 595 aa, synthetic construct
  REGION 1..595: note = Description of Artificial Sequence: Synthetic antibody variable domain
MKLPVRLLVLMFWIPASLSEVQLVQSGAEVEKPGASVKISCKASGSSFTGYNMNWVRQNIGKSLEWIGAIDPYYGGTSYNQKFKGRATLTVDKSTSTAYMHLKSLRSEDTAVYYCVSGMEYWGQGTSVTVSSASTKGPSVFPLAPSSKSTSGGTAALGCLVKDYFPEPVTVSWNSGALTSGVHTFPAVLQSSGLYSLSSVVTVPSSSLGTQTYICNVNHKPSNTKVDKRVEPKSCDKTHTCPPCPAPELLGGPSVFLFPPKPKDTLMISRTPEVTCVVVDVSHEDPEVKFNWYVDGVEVHNAKTKPREEQYNSTYRVVSVLTVLHQDWLNGKEYKCKVSNKALPAPIEKTISKAKGQPREPQVYTLPPSREEMTKNQVSLTCLVKGFYPSDIAVEWESNGQPENNYKTTPPVLDSDGSFFLYSKLTVDKSRWQQGNVFSCSVMHEALHNHYTQKSLSLSPGKAPTSSSTKKTQLQLEHLLLDLQMILNGINNYKNPKLTRMLTFKFYMPKKATELKHLQCLEEELKPLEEVLNLAQSKNFHLRPRDLISNINVIVLELKGSETTFMCEYADETATIVEFLNRWITFCQSIISTLT

SEQ ID NO: 848 - protein, 105 aa, Homo sapiens; identical to SEQ ID NO: 801

SEQ ID NO: 849 - protein, 102 aa, Homo sapiens; identical to SEQ ID NO: 802

SEQ ID NO: 850 - protein, 569 aa, Homo sapiens
EVQLVESGGGLVQPGGSLRLSCAASGFTVSGSYMSWVRQAPGKGLEWVSVIYSGGSTYYADSVKGRFTISRDNSKNTLYLQMNSLRAEDTAVYYCARDLRGSYDYWGQGTLVIVSSGSASAPTLFPLVSCENSPSDTSSVAVGCLAQDFLPDSITFSWKYKNNSDISSTRGFPSVLRGGKYAATSQVLLPSKDVMQGTDEHVVCKVQHPNGNKEKNVPLPVIAELPPKVSVFVPPRDGFFGNPRKSKLICQATGFSPRQIQVSWLREGKQVGSGVTTDQVQAEAKESGPTTYKVTSTLTIKESDWLSQSMFTCRVDHRGLTFQQNASSMCVPDQDTAIRVFAIPPSFASIFLTKSTKLTCLVTDLTTYDSVTISWTRQNGEAVKTHTNISESHPNATFSAVGEASICEDDWNSGERFTCTVTHTDLPSPLKQTISRPKGVALHRPDVYLLPPAREQLNLRESATITCLVTGFSPADVFVQWMQRGQPLSPEKYVTSAPMPEPQAPGRYFAHSILTVSEEEWNTGETYTCVVAHEALPNRVTERTVDKSTGKPTLYNVSLVMSDTAGTCY

SEQ ID NO: 851 - protein, 219 aa, Homo sapiens
EIVLTQSPLSLPVTLGQPASISCRSSQSLVYSDGNTYLNWFQQRPGQSPRRLIYKVSNRDSGVPDRFSGSGSGTDFTLKISRVEAEDVGVYYCMQGTHWPRTFGQGTKVEIKRTVAAPSVFIFPPSDEQLKSGTASVVCLLNNFYPREAKVQWKVDNALQSGNSQESVTEQDSKDSTYSLSSTLTLSKADYEKHKVYACEVTHQGLSSPVTKSFNRGEC

SEQ ID NO: 852 - protein, 240 aa, synthetic construct; identical to SEQ ID NO: 821
  REGION 1..240: note = Description of Artificial Sequence: Synthetic antibody variable domain

SEQ ID NO: 853 - protein, 462 aa, synthetic construct; identical to SEQ ID NO: 822
  REGION 1..462: note = Description of Artificial Sequence: Synthetic antibody variable domain

SEQ ID NO: 854 - protein, 113 aa, synthetic construct; identical to SEQ ID NO: 816
  REGION 1..113: note = Description of Artificial Sequence: Synthetic antibody variable domain

SEQ ID NO: 855 - protein, 113 aa, synthetic construct; identical to SEQ ID NO: 815
  REGION 1..113: note = Description of Artificial Sequence: Synthetic antibody variable domain

SEQ ID NO: 856 - protein, 240 aa, synthetic construct; identical to SEQ ID NO: 821
  REGION 1..240: note = Description of Artificial Sequence: Synthetic antibody variable domain

SEQ ID NO: 857 - protein, 462 aa, synthetic construct; identical to SEQ ID NO: 822
  REGION 1..462: note = Description of Artificial Sequence: Synthetic antibody variable domain

SEQ ID NO: 858 - protein, 137 aa, Mus musculus
MKLWLNWIFLVTLLNGFQCEVKLVESGGGLVLPGDSLRLSCATSEFTFTDYYMTWVRQPPRKALEWLGFIRNRANGYTTEYNPSVKGRFTISRDNSQILYLQMNTLRTEDSATYYCARVSNWAFDYWGQTTLTVSSA

SEQ ID NO: 859 - protein, 133 aa, Mus musculus
MKLPVRLLVLMFWIPGSSSDVVMTQTPLSLPVSLGDQASISCRSSQSLLKNNGNTFLHWYLQKSGQSPKLLIYKVSNRLSGVPDRFSGSGSGTYFTLKISRVEAEDLGVYFCSQSTHIPYTFGGGTKLELKRT

SEQ ID NO: 860 - protein, 112 aa, synthetic construct
  REGION 1..112: note = Description of Artificial Sequence: Synthetic antibody variable domain
DVVMTQTPLSLPVSLGDQASISCRSSQSLLKNNGNTFLHWYLQKSGQSPKLLIYKVSNRLSGVPDRFSGSGSGTYFTLKISRVEAEDLGVYFCSQSTHIPYTFGGGTKLEIK

SEQ ID NO: 861 - protein, 119 aa, synthetic construct
  REGION 1..119: note = Description of Artificial Sequence: Synthetic antibody variable domain
EVKLVESGGGLVLPGDSLRLSCATSEFTFTDYYMTWVRQPPRKALEWLGFIRNRANGYTTEYNPSVKGRFTISRDNSQSILYLQMNTLRTEDSATYYCARVSNWAFDYWGQGTTLTVSS

SEQ ID NO: 862 - protein, 112 aa, Mus musculus; identical to SEQ ID NO: 860

SEQ ID NO: 863 - protein, 119 aa, Mus musculus; identical to SEQ ID NO: 861

SEQ ID NO: 864 - protein, 112 aa, Mus musculus
DVVMTQTPLSLPVSDQASISCRSSQSLLLGKNNGNTFLHWYLQKSGQSPKLLIYKVSNRLSGVPDRFSGSGSGTYFTLKISRVEAEDLGVYFCSQSTHIPYTFGGGTKLEIK

SEQ ID NO: 865 - protein, 119 aa, Mus musculus; identical to SEQ ID NO: 861

SEQ ID NO: 866 - protein, 112 aa, synthetic construct; identical to SEQ ID NO: 860
  REGION 1..112: note = Description of Artificial Sequence: Synthetic antibody variable domain

SEQ ID NO: 867 - protein, 119 aa, synthetic construct; identical to SEQ ID NO: 861
  REGION 1..119: note = Description of Artificial Sequence: Synthetic antibody variable domain

SEQ ID NO: 868 - protein, 115 aa, synthetic construct
  REGION 1..115: note = Description of Artificial Sequence: Synthetic antibody variable domain
EVQLQQSGPELVKPGASVKISCKASGYTFTDYYMNWVKQSHGKSLEWIGDINPNNGGTSYNQKFKGKATLTVDKSSSTAYMELRSLTSEDSAVYYCATYGLGGYWGQGTTLTVSS

SEQ ID NO: 869 - protein, 108 aa, synthetic construct
  REGION 1..108: note = Description of Artificial Sequence: Synthetic antibody variable domain
GNIVMTQSPKSMSMSVGERVTQTCKASENVVTYVSWYQLKPEQSPKLLIYGASNRYTGVPDRFTGSGSATDFTLTISSVQAEDLADYHCGQGYSYPYTFGGGTKLEIK

SEQ ID NO: 870 - protein, 115 aa, synthetic construct
  REGION 1..115: note = Description of Artificial Sequence: Synthetic antibody variable domain
EVQLVESGGGLVKPGGSLKLSCAASGFTFSSYAMSWVRQTPEKRLEWVATISDGGYYTYYPDNVKGRFTISRDNAKNNLYLQMSHLKSGDTAMYYCARYDSFDYWGQGTTLTVSS

SEQ ID NO: 871 - protein, 111 aa, synthetic construct
  REGION 1..111: note = Description of Artificial Sequence: Synthetic antibody variable domain
GDIVLTQSPASLAVSLGQRATISYRASKSVSTSGYSYMHWNQQKPGQPPRLLIYLVSNLESGVPARFSGSGSGTDFTLNIHPVEEEDAATYYCQHIRELTTFGGGTKLEIK

SEQ ID NO: 872 - protein, 518 aa, synthetic construct
  REGION 1..518: note = Description of Artificial Sequence: Synthetic scFv sequence
EIVMTQTPATLSVSAGERVTITCKASQSVSNDVTWYQQKPGQAPRLLIYSASNRYSGVPARFSGSGYGTEFTFTISSVQSEDFAVYFCQQDYSSFGQGTKLEIKRTVAAPSVFIFPPSDEQLKSGTASVVCLLNNFYPREAKVQWKVDNALQSGNSQESVTEQDSKDSTYSLSSTLTLSKADYEKHKVYACEVTHQGLSSPVTKSFNRGECGGGGSGGGGSQVQLVQSGGGLTLSKADYEKHKVYACEVTHQGLSSPVTKSFNRGECGGGGSGGGGSQVQLVQSGGGVVQPGRSLRLSCKASGYTFTRYTMHWVRQAPGKCLEWIGYINPSRGYTNYNQKFKDRFTISRDNSKNTAFLQMDSLRPEDTGVYFCARYYDDHYCLDYWGQGTPVTVSSGGGGSGGGGSGGGGSDIQMTQSPSSLSASVGDRVTITCSASSSVSYMNWYQQTPGKAPKRWIYDTSKLASGVPSRFSGSGSGTDYTFTISSLQPEDIATYYCQQWSSNPFTFGCGTKLQITR

SEQ ID NO: 873 - protein, 524 aa, synthetic construct
  REGION 1..524: note = Description of Artificial Sequence: Synthetic scFv sequence
EIVMTQTPATLSVSAGERVTITCKASQSVSNDVTWYQQKPGQAPRLLIYSASNRYSGVPARFSGSGYGTEFTFTISSVQSEDFAVYFCQQDYSSFGQGTKLEIKRTVAAPSVFIFPPSDEQLKSGTASVVCLLNNFYPREAKVQWKVDNALQSGNSQESVTEQDSKDSTYSLSSTLTLSKADYEKHKVYACEVTHQGLSSPVTKSFNRGECGGGGSGGGGSASHVKLQESGPLTLSKADYEKHKVYACEVTHQGLSSPVTKSFNRGECGGGGSGGGGSASHVKLQESGPGLVQPSQSLSLTCTVSGFSLTDYGVHWVRQSPGKGLEWLGVIWSGGGTAYNTALISRLNIYRDNSKNQVFLEMNSLQAEDTAMYYCARRGSYPYNYFDAWGCGTTVTVSSGGGGSGGGGSGGGGSQAVVIQESALTTPPGETVTLTCGSSTGAVTASNYANWVQEKPDHCFTGLIGGHNNRPPGVPARFSGSLIGDKAALTIAGTQTEDEAIYFCALWYSDHWVIGGGTRLTVLG

SEQ ID NO: 874 - protein, 248 aa, synthetic construct
  REGION 1..248: note = Description of Artificial Sequence: Synthetic scFv sequence
HMQVQLQQPGAELVKPGASVKLSCKASGYTFTRYWMHWVRQRPGQGLEWIGEINPMDSRTNYNKKFKSKATLTVDKSSSTAYMQLSSLKSEDSAVYYCARPGRARGMDYWGQGNSVTVSSGGGGSGGGGSGGGGSGNIVLTQSPASLAVSLGQRAIISCLYGESVESYGNNFMHWYQQKPGQAPKLLIYLASNLESGVPARFSGSGSRTDFTLTIDPVEADDAATYYCQQNNEDPTFGGGTKLEIKKA

SEQ ID NO: 875 - protein, 225 aa, synthetic construct
  REGION 1..225: note = Description of Artificial Sequence: Synthetic scFv sequence
EVQLQQSGPELVKPGASVKISCKASGYTFTDYYMNWVKQSHGKSLEWIGDINPNNGGTSYNQKFKGKATLTVDKSSSTAYMELRSLTSEDSAVYYCATYGLGGYWGQGTTLTVSSGNIVMTQSPKSMSMSVGERVTLTCKASENVVTYVSWYQQKPEQSPKLLIYGASNRYTGVPDRFTGSGSATDFTLTISSVQAEDLADYHCGQGYSYPYTFGGGTKLEVKKA

SEQ ID NO: 876 - protein, 244 aa, synthetic construct
  REGION 1..244: note = Description of Artificial Sequence: Synthetic scFv sequence
MEVQLVESGGGLVKPGGSLKLSCAASGFTFSSYAMSWARQTPEKRLEWVATISDGGYYTYYPDNVKGRFTISRDNAKNNLYLQMSHLKSGDTAMYYCARYDSFDYWGQGTTLTVSSGGGGSGGGGSRGGGSGDIVLTQSPASLAVSLGQRATISYRASKSVSTSGYSYMHWNQQKPGQPPRLLIYLVSNLESGVPARFSGSGSGTDFTLNIHPVEEEDAATYYCQHIRELTTFGGGTKLEIKKA

SEQ ID NO: 877 - protein, 230 aa, synthetic construct
  REGION 1..230: note = Description of Artificial Sequence: Synthetic scFv sequence
MQVQLQQPGAELVKPGASVKLSCKASGYTFTRYWMHWVRQRPGQGLEWIGEINPSNGRTNYNEKFKSKATLTVDKSSSTAYMQLSSLKSEDSAVYYCARPGRARGMDYWGQGNSVTVSSGNIVLTQSPASLAVSLGQRATISCRASESVESYGNNFMHWYQQKPGQAPKLLIYLASNLESGVPARFSGSGSRTDFTLTIDPVEADDAATYYCQQNNEDPTFGGGTKLEIK

SEQ ID NO: 878 - protein, 241 aa, synthetic construct
  REGION 1..241: note = Description of Artificial Sequence: Synthetic scFv sequence
QVQLVESGPGVVQPGRSLRISCAVSGFSVTNYGVHWVRQPPGKGLEWLGVIWAGGITNYNSAFMSRLTISKDNSKNTVYLQMNSLRAEDTAMYYCASRGGHYGYALDYWGQGTLVTVSSGSTSGSGKPGSSEGSTKGEIVMTQTPATLSVSAGERVTITCKASQSVSNDVTWYQQKPGQAPRLLIYSASNRYSGVPARFSGSGYGTEFTFTISSVQSEDFAVYFCQQDYSSFGQGTKLEIK

SEQ ID NO: 879 - protein, 249 aa, synthetic construct
  REGION 1..249: note = Description of Artificial Sequence: Synthetic scFv sequence
EVKLVESGGGLVLPGDSLRLSCATSEFTFTDYYMTWVRQPPRKALEWLGFIRNRANGYTTEYNPSVKGRFTISRDNSQSILYLQMNTLRTEDSATYYCARVSNWAFDYWGQGTTLTVSSGSTSGSGKPGSSEGSTKGDVVMTQTPLSLPVSLGDQASISCRSSQSLLKNNGNTFLHWYLQKSGQSPKLLIYKVSNRLSGVPDRFSGSGSGTYFTLKISRVEAEDLGVYFCSQSTHIPYTFGGGTKLEIK

SEQ ID NO: 880 - protein, 244 aa, synthetic construct
  REGION 1..244: note = Description of Artificial Sequence: Synthetic scFv sequence
EVQLVQSGAEVEKPGASVKISCKASGSSFTGYNMNWVRQNIGKSLEWIGAIDPYYGGTSYNQKFKGRATLTVDKSTSTAYMHLKSLRSEDTAVYYCVSGMEYWGQGTSVTVSSGSTSGSGKPGSSEGSTKGDVVMTQTPLSLPVTPGEPASISCRSSQSLVHRNGNTYLHWYLQKPGQSPKLLIHKVSNRFSGVPDRFSGSGSGTDFTLKISRVEAEDLGVYFCSQSTHVPPLTFGAGTKLELK

SEQ ID NO: 881 - protein, 243 aa, synthetic construct
  REGION 1..243: note = Description of Artificial Sequence: Synthetic scFv sequence
QVQLKESGPVLVAPSQTLSITCTVSGFSLASYNIHVWRQPPGKGLEWLGVIWAGGSTNYNSALMSRLSISKDNSKSQVFLQMNSLQTDDTAMYYCAKRSDDYSWFAYWGQGTLVTVSASGGGGSGGGGSGGGGSENVLTQSPAIMSASPGEKVTMTCRASSSVSSSYLHWYQQKSGASPKVWIYSTSNLASGVPGRFSGSGSGTSYSLTISSVEAEDAATYYCQQYSGYPITFGAGTKVEVKR

SEQ ID NO: 882 - protein, 241 aa, synthetic construct
  REGION 1..241: note = Description of Artificial Sequence: Synthetic scFv sequence
QVQLQESGPGLVKPSQTLSITCTVSGFSLASYNIHWVRQPPGKGLEWLGVIWAGGSTNYNSALMSRLTISKDNSKNQVFLKMSSLTAADTAVYYCAKRSDDYSWFAYWGQTLVTVSSGGGGSGGGGSGGGGSENQMTQSPSSLSASVGDRVTMTCRASSSVSSSYLHWYQQKSGKAPKVWIYSTSNLASGVPSRFSGSGSGTDYTLTISSLQPEDFATYYCQQYSGYPITFGQGTKVEIKR

SEQ ID NO: 883 - protein, 239 aa, synthetic construct
  REGION 1..239: note = Description of Artificial Sequence: Synthetic scFv sequence
EIVMTQTPATLSVSAGERVTITCKASQSVSNHVTWYQQKPGQAPRLLIYSASNRYSGVPARFSGSGYGTEFTFTISSVQSEDFAVYFCQQDYSSFGQGTKLEIKRGGGGSGGGGSGGGGSQVQLVESGPGVVQPGRSLRISCAVSGFSVTNYGVHWVRQPPGKGLEWLGVIWAGGITNYNSAFMSRLTISKDNSKNTVYLQMNSLRAEDTAMYYCASRGGHYGYALDYWGQGTLVTVSS

SEQ ID NO: 884 - protein, 239 aa, synthetic construct
  REGION 1..239: note = Description of Artificial Sequence: Synthetic scFv sequence
EIVMTQTPATLSVSAGERVTITCKASQSVSNHVTWYQQKPGQAPRLLIYSASNRYSGVPARFSGSGYGTEFTFTISSVQSEDFAVYFCQQDYSSFGQGTKLEIKRGGGGSGGGGSGGGGSQVQLVESGPGVVQPGRSLRISCAVSGFSVTNYGVHWVRQPPGKGLEWLGVIWAIGITNYNSAFMSRLTISKDNSKNTVYLQMNSLRAEDTAMYYCASRGGHYGYALDYWGQGTLVTVSS

SEQ ID NO: 885 - protein, 239 aa, synthetic construct
  REGION 1..239: note = Description of Artificial Sequence: Synthetic scFv sequence
KIVMTQTPATLSVSAGERVTITCKASQSVSNDVTWYQQKPGQAPRLLIYSASNRYSGVPARFSGSGYGTEFTFTISSVQSEDFAVYFCQQDYSSFGQGTKLEIKRGGGGSGGGGSGGGGSQVQLVESGPGVVQPGRSLRISCAVSGFSVTNYGVHWVRQPPGKGLEWLGVIWAGGITNYNSAFMSRLTISKDNSKNTVYLQMNSLRAEDTAMYYCASRGGHYGYALDYWGQGTLVTVSS

SEQ ID NO: 886 - protein, 239 aa, synthetic construct
  REGION 1..239: note = Description of Artificial Sequence: Synthetic scFv sequence
KIVMTQTPATLSVSAGERVTITCKASQSVSNDVTWYQQKPGQAPRLLIYSASNRYSGVPARFSGSGYGTEFTFTISSVQSEDFAVYFCQQDYSSFGQGTKLEIKRGGGGSGGGGSGGGGSQVQLVESGPGVVQPGRSLRISCAVSGFSVTNYGVHWVRQPPGKGLEWLGVIWAIGITNYNSAFMSRLTISKDNSKNTVYLQMNSLRAEDTAMYYCASRGGHYGYALDYWGQGTLVTVSS

SEQ ID NO: 887 - protein, 239 aa, synthetic construct
  REGION 1..239: note = Description of Artificial Sequence: Synthetic scFv sequence
KIVMTQTPATLSVSAGERVTITCKASQSVSNHVTWYQQKPGQAPRLLIYSASNRYSGVPARFSGSGYGTEFTFTISSVQSEDFAVYFCQQDYSSFGQGTKLEIKRGGGGSGGGGSGGGGSQVQLVESGPGVVQPGRSLRISCAVSGFSVTNYGVHWVRQPPGKGLEWLGVIWAGGITNYNSAFMSRLTISKDNSKNTVYLQMNSLRAEDTAMYYCASRGGHYGYALDYWGQGTLVTVSS

SEQ ID NO: 888 - protein, 239 aa, synthetic construct
  REGION 1..239: note = Description of Artificial Sequence: Synthetic scFv sequence
KIVMTQTPATLSVSAGERVTITCKASQSVSNHVTWYQQKPGQAPRLLIYSASNRYSGVPARFSGSGYGTEFTFTISSVQSEDFAVYFCQQDYSSFGQGTKLEIKRGGGGSGGGGSGGGGSQVQLVESGPGVVQPGRSLRISCAVSGFSVTNYGVHWVRQPPGKGLEWLGVIWAIGITNYNSAFMSRLTISKDNSKNTVYLQMNSLRAEDTAMYYCASRGGHYGYALDYWGQGTLVTVSS

SEQ ID NO: 889 - protein, 239 aa, synthetic construct
  REGION 1..239: note = Description of Artificial Sequence: Synthetic scFv sequence
EIVMTQTPATLSVSAGERVTITCKASQSVSNDVTWYQQKPGQAPRLLIYSASNRYSGVPARFSGSGYGTEFTFTISSVQSEDFAVYFCQQDYSSFGQGTKLEIKRGGGGSGGGGSGGGGSQVQLVESGPGVVQPGRSLRISCAVSGFSVTNYGVHWVRQPPGKGLEWLGVIWAIGITNYNSAFMSRLTISKDNSKNTVYLQMNSLRAEDTAMYYCASRGGHYGYALDYWGQGTLVTVSS

SEQ ID NO: 890 - protein, 239 aa, synthetic construct
  REGION 1..239: note = Description of Artificial Sequence: Synthetic scFv sequence
EIVMTQTPATLSVSAGERVTITCRASQSVSNDVTWYQQKPGQAPRLLIYSASNRYTGIPARFSGSGYGTEFTFTISSVQSEDFAVYFCQQDYSSFGQGTKLEIKRGGGGSGGGGSGGGGSQVQLVESGPGVVQPGRSLRLSCAVSGFSVTNYGVHWVRQPPGKGLEWLGVIWAGGITNYNSSVKGRLTISKDNSKNTVYLQMNSLRAEDTAVYYCASRGGHYGYALDYWGQGTLVTVSS

SEQ ID NO: 891 - protein, 239 aa, synthetic construct
  REGION 1..239: note = Description of Artificial Sequence: Synthetic scFv sequence
EIVMTQTPATLSVSAGERVTITCRASQSVSNHVTWYQQKPGQAPRLLIYSASNRYTGIPARFSGSGYGTEFTFTISSVQSEDFAVYFCQQDYSSFGQGTKLEIKRGGGGSGGGGSGGGGSQVQLVESGPGVVQPGRSLRLSCAVSGFSVTNYGVHWVRQPPGKGLEWLGVIWAGGITNYNSSVKGRLTISKDNSKNTVYLQMNSLRAEDTAVYYCASRGGHYGYALDYWGQGTLVTVSS

SEQ ID NO: 892 - protein, 239 aa, synthetic construct
  REGION 1..239: note = Description of Artificial Sequence: Synthetic scFv sequence
EIVMTQTPATLSVSAGERVTITCRASQSVSNDVTWYQQKPGQAPRLLIYSASNRYTGIPARFSGSGYGTEFTFTISSVQSEDFAVYFCQQDYSSFGQGTKLEIKRGGGGSGGGGSGGGGSQVQLVESGPGVVQPGRSLRLSCAVSGFSVTNYGVHWVRQPPGKGLEWLGVIWAIGITNYNSSVKGRLTISKDNSKNTVYLQMNSLRAEDTAVYYCASRGGHYGYALDYWGQGTLVTVSS

SEQ ID NO: 893 - protein, 239 aa, synthetic construct
  REGION 1..239: note = Description of Artificial Sequence: Synthetic scFv sequence
EIVMTQTPATLSVSAGERVTITCRASQSVSNHVTWYQQKPGQAPRLLIYSASNRYTGIPARFSGSGYGTEFTFTISSVQSEDFAVYFCQQDYSSFGQGTKLEIKRGGGGSGGGGSGGGGSQVQLVESGPGVVQPGRSLRLSCAVSGFSVTNYGVHWVRQPPGKGLEWLGVIWAIGITNYNSSVKGRLTISKDNSKNTVYLQMNSLRAEDTAVYYCASRGGHYGYALDYWGQGTLVTVSS

SEQ ID NO: 894 - protein, 239 aa, synthetic construct
  REGION 1..239: note = Description of Artificial Sequence: Synthetic scFv sequence
KIVMTQTPATLSVSAGERVTITCRASQSVSNDVTWYQQKPGQAPRLLIYSASNRYTGIPARFSGSGYGTEFTFTISSVQSEDFAVYFCQQDYSSFGQGTKLEIKRGGGGSGGGGSGGGGSQVQLVESGPGVVQPGRSLRLSCAVSGFSVTNYGVHWVRQPPGKGLEWLGVIWAGGITNYNSSVKGRLTISKDNSKNTVYLQMNSLRAEDTAVYYCASRGGHYGYALDYWGQGTLVTVSS

SEQ ID NO: 895 - protein, 239 aa, synthetic construct
  REGION 1..239: note = Description of Artificial Sequence: Synthetic scFv sequence
KIVMTQTPATLSVSAGERVTITCRASQSVSNDVTWYQQKPGQAPRLLIYSASNRYTGIPARFSGSGYGTEFTFTISSVQSEDFAVYFCQQDYSSFGQGTKLEIKRGGGGSGGGGSGGGGSQVQLVESGPGVVQPGRSLRLSCAVSGFSVTNYGVHWVRQPPGKGLEWLGVIWAIGITNYNSSVKGRLTISKDNSKNTVYLQMNSLRAEDTAVYYCASRGGHYGYALDYWGQGTLVTVSS

SEQ ID NO: 896 - protein, 239 aa, synthetic construct
  REGION 1..239: note = Description of Artificial Sequence: Synthetic scFv sequence
KIVMTQTPATLSVSAGERVTITCRASQSVSNHVTWYQQKPGQAPRLLIYSASNRYTGIPARFSGSGYGTEFTFTISSVQSEDFAVYFCQQDYSSFGQGTKLEIKRGGGGSGGGGSGGGGSQVQLVESGPGVVQPGRSLRLSCAVSGFSVTNYGVHWVRQPPGKGLEWLGVIWAGGITNYNSSVKGRLTISKDNSKNTVYLQMNSLRAEDTAVYYCASRGGHYGYALDYWGQGTLVTVSS

SEQ ID NO: 897 - protein, 100 aa, synthetic construct
  REGION 1..100: note = Description of Artificial Sequence: Synthetic scFv sequence
KIVMTQTPATLSVSAGERVTITCRASQSVSNHVTWYQQKPGQAPRLLIYSASNRYTGIPARFSGSGYGTEFTFTISSVQSEDFAVYFCQQDYSSFGQGTK

SEQ ID NO: 898 - protein, 139 aa, synthetic construct
  REGION 1..139: note = Description of Artificial Sequence: Synthetic scFv sequence
LEIKRGGGGSGGGGSGGGGSQVQLVESGPGVVQPGRSLRLSCAVSGFSVTNYGVHWVRQPPGKGLEWLGVIWAIGITNYNSSVKGRLTISKDNSKNTVYLQMNSLRAEDTAVYYCASRGGHYGYALDYWGQGTLVTVSS

SEQ ID NO: 899 - protein, 243 aa, synthetic construct
  REGION 1..243: note = Description of Artificial Sequence: Synthetic scFv sequence
QVQLKESGPVLVAPSQTLSITCTVSGFSLASYNIHWVRQPPGKGLEWLGVIWAGGSTNYNSALMSRLSISKDNSKSQVFLQMNSLQTDDTAMYYCAKRSDDYSWFAYWGQGTLVTVSASGGGGSGGGGSGGGGSENVLTQSPAIMSASPGEKVTMTCRASSSVSSSYLHWYQQKSGASPKVWIYSTSNLASGVPGRFSGSGSGTSYSLTISSVEAEDAATYYCQQYSGYPITFGAGTKVEVKR

SEQ ID NO: 900 - protein, 242 aa, synthetic construct
  REGION 1..242: note = Description of Artificial Sequence: Synthetic scFv sequence
QVQLQESGPGLVKPSQTLSITCTVSGFSLASYNIHWVRQPPGKGLEWLGVIWAGGSTNYNSALMSRLTISKDNSKNQVFLKMSSLTAADTAVYYCAKRSDDYSWFAYWGQGTLVTVSSGGGGSGGGGSGGGGSENQMTQSPSSLSASVGDRVTMTCRASSSVSSSYLHWYQQKSGKAPKVWIYSTSNLASGVPSRFSGSGSGTDYTLTISSLQPEDFATYYCQQYSGYPITFGQGTKVEIKR

SEQ ID NO: 901 - protein, 115 aa, synthetic construct
  REGION 1..115: note = Description of Artificial Sequence: Synthetic antibody variable domain
EVQLQQSGPELVKPGASVKISCKASGYTFTDYNMHWVKQSHGKSLEWIGYIYPYNGGTGYNQKFKSKATLTVDNSSSTAYMDVRSLTSEDSAVYYCARGRPAMDYWGQGTSVTVS

SEQ ID NO: 902 - protein, 111 aa, synthetic construct
  REGION 1..111: note = Description of Artificial Sequence: Synthetic antibody variable domain
DIVLTQSPASLAVSLGQRATISCRASESVDNYGISFMNWFQQKPGQPPKLLIYAASNQGSGVPARFSGSGSGTDFSLNIHPMEEDDTAMYFCQQSKEVPWTFGGGTKLEIK

SEQ ID NO: 903 - protein, 117 aa, synthetic construct
  REGION 1..117: note = Description of Artificial Sequence: Synthetic antibody variable domain
QVQLQQSGPELVRPGTFVKISCKASGYTFTNYDINWVNQRPGQGLEWIGWIYPGDGSTKYNEKFKAKATLTADKSSSTAYLQLNNLTSENSAVYFCASGYEDAMDYWGQGTSVTVSS

SEQ ID NO: 904 - protein, 228 aa, synthetic construct
  REGION 1..228: note = Description of Artificial Sequence: Synthetic antibody variable domain
DIKMTQSPSSMYASLGERVIINCKASQDINSYLSWFQQKPGKSPKTLIYRANRLVDGVPSRFSGSGSGQDYSLTISSLEYEDMGIYYCLQYDEFPLTFGAGTKLELKREVKLQESGPELVKPGASVKMSCKASGYKFTDYVVHWLKQKPGQGLEWIGYINPYNDGTKYNEKFKGKATLTSDKSSSTAYMEVSSLTSEDSAVYYCARDYRYEVYGMDYWGQGTSVTVSS

SEQ ID NO: 905 - protein, 120 aa, synthetic construct
  REGION 1..120: note = Description of Artificial Sequence: Synthetic antibody variable domain
EVKLQESGPELVKPGASVKMSCKASGYKFTDYVVHWLKQKPGQGLEWIGYINPYNDGTKYNEKFKGKATLTSDKSSSTAYMEVSSLTSEDSAVYYCARDYRYEVYGMDYWGQGTSVTVSS

SEQ ID NO: 906 - protein, 115 aa, synthetic construct
  REGION 1..115: note = Description of Artificial Sequence: Synthetic antibody variable domain
DIVLTQSPTIMSASPGERVTMTCTASSSVNYIHWYQQKSGDSPLRWIFDTSKVASGVPARFSGSGSGTSYSLTISTMEAEDAATYYCQQWRSYPLTFGDGTRLELKRADAAPTVS

SEQ ID NO: 907 - protein, 118 aa, synthetic construct
  REGION 1..118: note = Description of Artificial Sequence: Synthetic antibody variable domain
QVQLQQPGAEVVKPGASVKMSCKASGYTFTSYYIHWIKQTPGQGLEWVGVIYPGNDDISYNQKFKGKATLTADKSSTTAYMQLSSLTSEDSAVYYCAREVRLRYFDVWGAGTTVTVSS

SEQ ID NO: 908 - protein, 113 aa, synthetic construct
  REGION 1..113: note = Description of Artificial Sequence: Synthetic antibody variable domain
NIMLTQSPSSLAVSAGEKVTMSCKSSQSVFFSSSQKNYLAWYQQIPGQSPKLLIYWASTRESGVPDRFTGSGSGTDFTLTISSVQSEDLAIYYCHQYLSSRTFGGGTKLEIKR

SEQ ID NO: 909 - protein, 119 aa, synthetic construct
  REGION 1..119: note = Description of Artificial Sequence: Synthetic antibody variable domain
QVQLVQSGAEVKKPGASVKVSCKASGYSFPDYYINWVRQAPGQGLEWMGWIYFASGNSEYNQKFTGRVTMTRDTSINTAYMELSSLTSEDTAVYFCASLYDYDWYFDVWGQGTMVTVSS

SEQ ID NO: 910 - protein, 112 aa, synthetic construct
  REGION 1..112: note = Description of Artificial Sequence: Synthetic antibody variable domain
DIVMTQTPLSLSVTPGQPASISCKSSQSLVHSNGNTYLHWYLQKPGQSPQLLIYKVSNRFSGVPDRFSGSGSGTDFTLKISRVEAEDVGIYYCSQSSIYPWTFGQGTKLEIK

SEQ ID NO: 911 - protein, 119 aa, synthetic construct
  REGION 1..119: note = Description of Artificial Sequence: Synthetic antibody variable domain
QVQLVQSGAEVKKPGASVKVSCKASGYSFPDYYINWVRQAPGQGLEWMGWIYFASGNSEYNQKFTGRVTMTRDTSSSTAYMELSSLRSEDTAVYFCASLYDYDWYFDVWGQGTMVTVSS

SEQ ID NO: 912 - protein, 112 aa, synthetic construct
  REGION 1..112: note = Description of Artificial Sequence: Synthetic antibody variable domain
DIVMTQTPLSLSVTPGEPASISCKSSQSLVHSNGNTYLHWYLQKPGQSPQLLIYKVSNRFSGVPDRFSGSGSGADFTLKISRVEAEDVGVYYCAETSHVPWTFGQGTKLEIK

SEQ ID NO: 913 - protein, 117 aa, synthetic construct
  REGION 1..117: note = Description of Artificial Sequence: Synthetic antibody variable domain
QIQLVQSGPELKKPGETVKISCKASGYTFTDYSINWVKRAPGKGLKWMGWINTETREPAYAYDFRGRFAFSLETSASTAYLQINNLKYEDTATYFCALDYSYAMDYWGQGTSVTVSS

SEQ ID NO: 914 - protein, 111 aa, synthetic construct
  REGION 1..111: note = Description of Artificial Sequence: Synthetic antibody variable domain
DIVLTGSPPSLAMSLGKRATISCRASESVTILGSHLIHWYQQKPGQPPTLLIQLASNVQTGVPARFSGSGSRTDFTLTIDPVEEDDVAVYYCLQSRTIPRTFGGGTKLEIK

SEQ ID NO: 915 - protein, 117 aa, synthetic construct
  REGION 1..117: note = Description of Artificial Sequence: Synthetic antibody variable domain
QIQLVQSGPELKKPGETVKISCKASGYTFTHYSMNWVKQAPGKGLKWMGRINTETGEPLYADDFKGRFAFSLETSASTAYLVINNLKNEDTATFFCSNDYLYSCDYWGRGTTLTVSS

SEQ ID NO: 916 - protein, 111 aa, synthetic construct
  REGION 1..111: note = Description of Artificial Sequence: Synthetic antibody variable domain
DIVLTQSPPSLAMSLGKRATISCRASESVTILGSHLIYWYQQKPGQPPTLLIQLASNVQTGVPARFSGSGSRTDFTLTIDPVEEDDVAVYYCLQSRTIPRTFGGGTKLEIK

SEQ ID NO: 917 - protein, 120 aa, synthetic construct [sequence omitted]

SEQ ID NO: 918 - protein, 107 aa, synthetic construct [sequence omitted]

SEQ ID NO: 919 - protein, 109 aa, synthetic construct
  REGION 1..109: note = Description of Artificial Sequence: Synthetic antibody variable domain
DIQMTQSPSSLSASVGDRVTITCRASQDVNTAVAWYQQKPGKAPKLLIYSASFLESGVPSRFSGSRSGTDFTLTISSLQPEDFATYYCQQHYTTPPTFGQGTKVEIKRT

SEQ ID NO: 920 - protein, 120 aa, synthetic construct
  REGION 1..120: note = Description of Artificial Sequence: Synthetic antibody variable domain
EVQLVESGGGLVQPGGSLRLSCAASGFNIKDTYIHWVRQAPGKGLEWVARIYPTNGYTRYADSVKGRFTISADTSKNTAYLQMNSLRAEDTAVYYCSRWGGDGFYAMDVWGQGTLVTVSS

SEQ ID NO: 921 - protein, 109 aa, synthetic construct
  REGION 1..109: note = Description of Artificial Sequence: Synthetic antibody variable domain
DIQMTQSPSSLSASVGDRVTITCRASQDVSSYLAWYQQKPGKAPKLLIYAASSLESGVPSRFSGSGSGTDFTLTISSLQPEDFATYYCQQYNSLPYTFGQGTKVEIKRT

SEQ ID NO: 922 - protein, 120 aa, synthetic construct
  REGION 1..120: note = Description of Artificial Sequence: Synthetic antibody variable domain
EVQLVESGGGLVQPGGSLRLSCAASGFTFSDYAMSWVRQAPGKGLEWVAVISENGSDTYYADSVKGRFTISRDDSKNTLYLQMNSLRAEDTAVYYCARDRGGAVSYFDVWGQGTLVTVSS

SEQ ID NO: 923 - protein, 109 aa, synthetic construct
  REGION 1..109: note = Description of Artificial Sequence: Synthetic antibody variable domain
DIVMTQSHKFMSTSVGDRVSITCKASQDVNTAVAWYQQKPGHSPKLLIYSASFRYTGVPDRFTGNRSGTDFTFTISSVQAEDLAVYYCQQHYTTPPTFGGGTKLEIKRA

SEQ ID NO: 924 - protein, 120 aa, synthetic construct
  REGION 1..120: note = Description of Artificial Sequence: Synthetic antibody variable domain
EVQLQQSGPELVKPGASLKLSCTASGFNIKDTYIHWVKQRPEQGLEWIGRIYPTNGYTRYDPKFQDKATITADTSSNTAYLQVSRLTSEDTAVYYCSRWGGDGFYAMDYWGQGASVTVSS

SEQ ID NO: 925 - protein, 20 aa, synthetic construct
  REGION 1..20: note = Description of Artificial Sequence: Synthetic antibody variable domain
EVQLVESGGGLVQPKGSLKL

SEQ ID NO: 926 - protein, 20 aa, synthetic construct
  REGION 1..20: note = Description of Artificial Sequence: Synthetic antibody variable domain
DIVMTQSQKFMSTSVVDRIS

SEQ ID NO: 927 - protein, 107 aa, Mus musculus
DTVMTQSHKIMSTSVGDRVSITCKASQDVSIGVAWYQQRPGQSPKLLIYSASYRYTGVPDRFTGSGSGTDFTFTISSVQAEDLAVYYCQQYYIYPYTFGGGTKLEIK

SEQ ID NO: 928 - protein, 119 aa, Mus musculus
EVQLQQSGPELVKPGTSVKISCKASGFTFTDYTMDWVKQSHGKSLEWIGDVNPNSGGSIYNQRFKGKASLTVDRSSRIVYMELRSLTFEDTAVYYCARNLGPSFYFDYWGQGTTLTVSS

SEQ ID NO: 929 - protein, 107 aa, synthetic construct [sequence omitted]

SEQ ID NO: 930 - protein, 119 aa, synthetic construct [sequence omitted]

SEQ ID NO: 931 - protein, 107 aa, synthetic construct
  REGION 1..107: note = Description of Artificial Sequence: Synthetic antibody variable domain
DIQMTQSPSSLSASVGDRVTITCRASQSISNYLAWYQQKPGKAPKLLIYAASSLESGVPSRFSGSGSGTDFTLTISSLQPEDFATYYCQQYNSLPWTFGQGTKVEIK

SEQ ID NO: 932 - protein, 119 aa, synthetic construct
  REGION 1..119: note = Description of Artificial Sequence: Synthetic antibody variable domain
EVQLVESGGGLVQPGGSLRLSCAASGFTFSSYAMSWVRQAPGKGLEWVAVISGDGGSTYYADSVKGRFTISRDNSKNTLYLQMNSLRAEDTAVYYCARGRVGYSLYDYWGQGTLVTVSS

SEQ ID NO: 933 - protein, 214 aa, synthetic construct
  REGION 1..214: note = Description of Artificial Sequence: Synthetic antibody variable domain
DIQMTQSPSSLSASVGDRVTITCKASQDVSIGVAWYQQKPGKAPKLLIYSASYRYTGVPSRFSGSGSGTDFTLTISSLQPEDFATYYCQQYYIYPYTFGQGTKVEIKRTVAAPSVFIFPPSDEQLKSGTASVVCLLNNFYPREAKVQWKVDNALQSGNSQESVTEQDSKDSTYSLSSTLTLSKADYEKHKVYACEVTHQGLSSPVTKSFNRGEC

SEQ ID NO: 934 - protein, 448 aa, synthetic construct
  REGION 1..448: note = Description of Artificial Sequence: Synthetic antibody variable domain
EVQLVESGGGLVQPGGSLRLSCAASGFTFTDYTMDWVRQAPGKGLEWVADVNPNSGGSIYNQRFKGRFTLSVDRSKNTLYLQMNSLRAEDTAVYYCARNLGPSFYFDYWGQGTLVTVSSASTKGPSVFPLAPSSKSTSGGTAALGCLVKDYFPEPVTVSWNSGALTSGVHTFPAVLQSSGLYSLSSVVTVPSSSLGTQTYICNVNHKPSNTKVDKKVEPKSCDKTHTCPPCPAPELLGGPSVFLFPPKPKDTLMISRTPEVTCVVVDVSHEDPEVKFNWYVDGVEVHNAKTKPREEQYNSTYRVVSVLTVLHQDWLNGKEYKCKVSNKALPAPIEKTISKAKGQPREPQVYTLPPSREEMTKNQVSLTCLVKGFYPSDIAVEWESNGQPENNYKTTPPVLDSDGSFFLYSKLTVDKSRWQQGNVFSCSVMHEALHNHYTQKSLSLSPG

SEQ ID NO: 935 - protein, 214 aa, synthetic construct
  REGION 1..214: note = Description of Artificial Sequence: Synthetic antibody variable domain
DIQMTQSPSSLSASVGDRVTITCRASQDVNTAVAWYQQKPGKAPKLLIYSASFLYSGVPSRFSGSRSGTDFTLTISSLQPEDFATYYCQQHYTTPPTFGQGTKVEIKRTVAAPSVFIFPPSDEQLKSGTASVVCLLNNFYPREAKVQWKVDNALQSGNSQESVTEQDSKDSTYSLSSTLTLSKADYEKHKVYACEVTHQGLSSPVTKSFNRGEC

SEQ ID NO: 936 - protein, 449 aa, synthetic construct
  REGION 1..449: note = Description of Artificial Sequence: Synthetic antibody variable domain
EVQLVESGGGLVQPGGSLRLSCAASGFNIKDTYIHWVRQAPGKGLEWVARIYPTNGYTRYADSVKGRFTISADTSKNTAYLQMNSLRAEDTAVYYCSRWGGDGFYAMDYWGQGTLVTVSSASTKGPSVFPLAPSSKSTSGGTAALGCLVKDYFPEPVTVSWNSGALTSGVHTFPAVLQSSGLYSLSSVVTVPSSSLGTQTYICNVNHKPSNTKVDKKVEPKSCDKTHTCPPCPAPELLGGPSVFLFPPKPKDTLMISRTPEVTCVVVDVSHEDPEVKFNWYVDGVEVHNAKTKPREEQYNSTYRVVSVLTVLHQDWLNGKEYKCKVSNKALPAPIEKTISKAKGQPREPQVYTLPPSREEMTKNQVSLTCLVKGFYPSDIAVEWESNGQPENNYKTTPPVLDSDGSFFLYSKLTVDKSRWQQGNVFSCSVMHEALHNHYTQKSLSLSPG

SEQ ID NO: 937 - protein, 217 aa, synthetic construct
  REGION 1..217: note = Description of Artificial Sequence: Synthetic antibody variable domain
VHSDIQMTQSPSSLSASVGDRVTITCKASQDVSIGVAWYQQKPGKAPKLLIYSASYRYTGVPSRFSGSGSGTDFTLTISSLQPEDFATYYCQQYYIYPYTFGQGTKVEIKRTVAAPSVFIFPPSDEQLKSGTASVVCLLNNFYPREAKVQWKVDNALQSGNSQESVTEQDSKDSTYSLSSTLTLSKADYEKHKVYACEVTHQGLSSPVTKSFNRGEC

SEQ ID NO: 938 - protein, 449 aa, synthetic construct
  REGION 1..449: note = Description of Artificial Sequence: Synthetic antibody variable domain
EVQLVESGGGLVQPGGSLRLSCAASGFTFTDYTMDWVRQAPGKGLEWVADVNPNSGGSIYNQRFKGRFTLSVDRSKNTLYLQMNSLRAEDTAVYYCARNLGPSFYFDYWGQGTLVTVSSASTKGPSVFPLAPSSKSTSGGTAALGCLVKDYFPEPVTVSWNSGALTSGVHTFPAVLQSSGLYSLSSVVTVPSSSLGTQTYICNVNHKPSNTKVDKKVEPKSCDKTHTCPPCPAPELLGGPSVFLFPPKPKDTLMISRTPEVTCVVVDVSHEDPEVKFNWYVDGVEVHNAKTKPREEQYNSTYRVVSVLTVLHQDWLNGKEYKCKVSNKALPAPIEKTISKAKGQPREPQVYTLPPSREEMTKNQVSLTCLVKGFYPSDIAVEWESNGQPENNYKTTPPVLDSDGSFFLYSKLTVDKSRWQQGNVFSCSVMHEALHNHYTQKSLSLSPGK

SEQ ID NO: 939 - protein, 124 aa, Homo sapiens
EVQLLESGGGLVQPGGSLRLSCAASGFTFSSYAMTWVRQAPGKGLEWVSAISGSGYSTYYADSEKGRFTISRDNSKNTLYLQMNSLRAEDTAVYYCAKGFQYGSGSYYTHFDYWGQGTLVTVSS

SEQ ID NO: 940 - protein, 107 aa, Homo sapiens
DIQMTQSPSSLSASVGDRVTITCRASQGISSWLAWYQQKPEKAPKSLIYAASSLQSGVPSRFSGSGSGTDFTLTISSLQPEDFATYYCQQYNSYPYTFGQGTKLEIK

SEQ ID NO: 941 - protein, 122 aa, Homo sapiens
QVQLVESGGGVVQPGRSLRLSCAASGFTFSSYDIHWVRQAPGKGLEWVAVIWYDGSNKYHADSVKGRFTISRDNSKNTLYLQMNSLRAEDTAVYYCARNYGLGSYYNYFDFWGQGTLVTVSS

SEQ ID NO: 942 - protein, 107 aa, Homo sapiens
DIQMTQSPSSLSASVGDRVTITCRASHGISSWLAWYQQKPEKAPKSLIYAASSLQSGVPSRFSGSGSGTDFTLTISSLQPEDFATYYCQQYNSYPYTFGQGTKLEIK

SEQ ID NO: 943 - protein, 122 aa, Homo sapiens
QVQLVESGGGVVQPGRSLRLSCAASGFTFSSYVMHWVRQAPGKGLEWVAVIWYDGSNKYYADSVKGRFTISRDNSKNTLYLQMNSLRAEDTAVYYCALMVRGLIITGYFDYWGQGTLVTVSS

SEQ ID NO: 944 - protein, 108 aa, Homo sapiens
EIVLTQSPATLSLSPGERATLSCRASQSVSSYLAWYQQKPGQAPRLLIYDASNRATGIPARFSGSGSGTDFTLTISSLEPEDFAVYYCQQRSNWPPYTFGQGTKLEIK

SEQ ID NO: 945 - protein, 109 aa, synthetic construct
  REGION 1..109: note = Description of Artificial Sequence: Synthetic antibody variable domain
DTVMTQSHKIMSTSVGDRVSITCKASQDVSIGVAWYQQRPGQSPKLLIYSASYRYTGVPDRFTGSGSGTDFTFTISSVQAEDLAVYYCQQYYIYPYTFGGGTKLEIKRT

SEQ ID NO: 946 - protein, 109 aa, synthetic construct
  REGION 1..109: note = Description of Artificial Sequence: Synthetic antibody variable domain
DIQMTQSPSSLSASVGDRVTITCKASQDVSIGVAWYQQKPGKAPKLLIYSASYRYTGVPSRFSGSGSGTDFTLTISSLQPEDFATYYCQQYYIYPYTFGQGTKVEIKRT

SEQ ID NO: 947 - protein, 109 aa, synthetic construct
  REGION 1..109: note = Description of Artificial Sequence: Synthetic antibody variable domain
DIQMTQSPSSLSASVGDRVTITCRASQSISNYLAWYQQKPGKAPKLLIYAASSLESGVPSRFSGSGSGTDFTLTISSLQPEDFATYYCQQYNSLPWTFGQGTKVEIKRT

SEQ ID NO: 948 - protein, 228 aa, synthetic construct
  REGION 1..228: note = Description of Artificial Sequence: Synthetic antibody variable domain
EVQLVESGGGLVQPGGSLRLSCAASGFNIKDTYIHWVRQAPGKGLEWVARIYPTNGYTRYADSVKGRFTISADTSKNTAYLQMNSLRAEDTAVYYCSRWGGDGFYAMDYWGQGTLVTVSSASTKGPSVFPLAPSSKSTSGGTAALGCLVKDYFPEPVTVSWNSGALTSGVHTFPAVLQSSGLYSLSSVVTVPSSSLGTQTYICNVNHKPSNTKVDKKVEPKSCDKTHT

SEQ ID NO: 949 - protein, 109 aa, synthetic construct
  REGION 1..109: note = Description of Artificial Sequence: Synthetic antibody variable domain
DIQMTQSPSSLSASVGDRVTITCRASQDVNTAVAWYQQKPGKAPKLLIYSASFLYSGVPSRFSGSRSGTDFTLTISSLQPEDFATYYCQQHYTTPPTFGQGTKVEIKRT

SEQ ID NO: 950 - protein, 142 aa, synthetic construct
  REGION 1..142: note = Description of Artificial Sequence: Synthetic antibody variable domain
MDFQVQIFSFLLISASVIISRGEVQLVESGGGLVQPGGSLRLSCAASGFNIKDTYIHWVRQAPGKGLEWVARIYPTNGYTRYADSVKGRFTISADTSKNTAYLQMNSLRAEDTAVYYCSRWGGDGFYAMDYWGQGTLVTVSS

SEQ ID NO: 951 - protein, 130 aa, synthetic construct
  REGION 1..130: note = Description of Artificial Sequence: Synthetic antibody variable domain
MDFQVQIFSFLLISASVIISRGDIQMTQSPSSLSASVGDRVTITCRASQDVNTAVAWYQQKPGKAPKLLIYSASFLYSGVPSRFSGSRSGTDFTLTISSLQPEDFATYYCQQHYTTPPTFGQGTKVEIKR

SEQ ID NO: 952 - protein, 472 aa, synthetic construct
  REGION 1..472: note = Description of Artificial Sequence: Synthetic antibody variable domain
MDFQVQIFSFLLISASVIISRGEVQLVESGGGLVQPGGSLRLSCAASGFNIKDTYIHWVRQAPGKGLEWVARIYPTNGYTRYADSVKGRFTISADTSKNTAYLQMNSLRAEDTAVYYCSRWGGDGFYAMDYWGQGTLVTVSSASTKGPSVFPLAPSSKSTSGGTAALGCLVKDYFPEPVTVSWNSGALTSGVHTFPAVLQSSGLYSLSSVVTVPSSSLGTQTYICNVNHKPSNTKVDKKVEPKSCDKTHTCPPCPAPELLGGPSVFLFPPKPKDTLMISRTPEVTCVVVDVSHEPEVKFNWYVDDGVEVHNAKTKPREEQYNSTYRVVSVLTVLHQDWLNGKEYKCKVSNKALPAPIEKTISKAKGQPREPQVYTLPPSRDELTKNQVSLTCLVKGFYPSDIAVEWESNGQPENNYKTTPPVLDSDGSFFLYSKLTVDKSRWQQGNVFSCSVMHEALHNHYTQKSLSLSPGK

SEQ ID NO: 953 - protein, 236 aa, synthetic construct
  REGION 1..236: note = Description of Artificial Sequence: Synthetic antibody variable domain
MDFQVQIFSFLLISASVIISRGDIQMTQSPSSLSASVGDRVTITCRASQDVNTAVAWYQQKPGKAPKLLIYSASFLYSGVPSRFSGSRSGTDFTLTISSLQPEDFATYYCQQHYTTPPTFGQGTKVEIKRTVAAPSVFIFPPSDEQLKSGTASVVCLLNNFYPREAKVQWKVDNALQSGNSQESVTEQDSKDSTYSLSSTLTLSKADYEKHKVYACEVTHQGLSSPVTKSFNRGEC

SEQ ID NO: 954 - protein, 628 aa, synthetic construct
  REGION 1..628: note = Description of Artificial Sequence: Synthetic antibody variable domain
MDFQVQIFSFLLISASVIISRGEVQLVESGGGLVQPGGSLRLSCAASGFNIKDTYIHWVRQAPGKGLEWVARIYPTNGYTRYADSVKGRFTISADTSKNTAYLQMNSLRAEDTAVYYCSRWGGDGFYAMDYWGQGTLVTVSSASTKGPSVFPLAPSSKSTSGGTAALGCLVKDYFPEPVTVSWNSGALTSGVHTFPAVLQSSGLYSLSSVVTVPSSSLGTQTYICNVNHKPSNTKVDKKVEPKSCDKTHTCPPCPAPELLGGPSVFLFPPKPKDTLMISRTPEVTCVVVDVSHEPEVKFNWYVDDGVEVHNAKTKPREEQYNSTYRVVSVLTVLHQDWLNGKEYKCKVSNKALPAPIEKTISKAKGQPREPQVYTLPPSRDELTKNQVSLTCLVKGFYPSDIAVEWESNGQPENNYKTTPPVLDSDGSFFLYSKLTVDKSRWQQGNVFSCSVMHEALHNHYTQKSLSLSPGKTQDCSFQHSPISSDFAVKIRELSDYLLQDYPVTVASNLQDEELCGGLWRLVLAQRWMERLKTVAGSKMQGLLERVNTEIHFVTKCAFQPPPSCLRFVQTNISRLLQETSEQLVALKPWITRQNFSRCLELQCQPDSSTLPPPWSPRPLEATAPTAP

SEQ ID NO: 955 - protein, 643 aa, synthetic construct
  REGION 1..643: note = Description of Artificial Sequence: Synthetic antibody variable domain
MDFQVQIFSFLLISASVIISRGEVQLVESGGGLVQPGGSLRLSCAASGFNIKDTYIHWVRQAPGKGLEWVARIYPTNGYTRYADSVKGRFTISADTSKNTAYLQMNSLRAEDTAVYYCSRWGGDGFYAMDYWGQGTLVTVSSASTKGPSVFPLAPSSKSTSGGTAALGCLVKDYFPEPVTVSWNSGALTSGVHTFPAVLQSSGLYSLSSVVTVPSSSLGTQTYICNVNHKPSNTKVDKKVEPKSCDKTHTCPPCPAPELLGGPSVFLFPPKPKDTLMISRTPEVTCVVVDVSHEPEVKFNWYVDDGVEVHNAKTKPREEQYNSTYRVVSVLTVLHQDWLNGKEYKCKVSNKALPAPIEKTISKAKGQPREPQVYTLPPSRDELTKNQVSLTCLVKGFYPSDIAVEWESNGQPENNYKTTPPVLDSDGSFFLYSKLTVDKSRWQQGNVFSCSVMHEALHNHYTQKSLSLSPGKGGGGSGGGGSGGGGSTQDCSFQHSPISSDFAVKIRELSDYLLQDYPVTVASNLQDEELCGGLWRLVLAQRWMERLKTVAGSKMQGLLERVNTEIHFVTKCAFQPPPSCLRFVQTNISRLLQETSEQLVALKPWITRQNFSRCLELQCQPDSSTLPPPWSPRPLEATAPTAP

SEQ ID NO: 956 - protein, 214 aa, Mus musculus
DIQMTQSPSSLSASVGDRVTITCRASQDVNTAVAWYQQKPGKAPKLLIYSASFLYSGVPSRFSGSRSGTDFTLTTSSLQPEDFATYYCQQHYTTPPTFGQGTKVEIKRTVAAPSVFIFPPSDEQLKSGTASVVCLLNNFYPREAKVQWKVDNALQSGNSQESVTEQDSKDSTYSLSSTLTLSKADYEKHKVYACEVTHQGLSSPVTKSFNRGEC

SEQ ID NO: 957 - protein, 220 aa, Mus musculus
EVQLVESGGGLVQPGGSLRLSCAASGFNIKDTYIHWVRQAPGKGLEWVARTYPTNGYTRYADSVKGRFTISADTSKNTAYLQMNSLPAEDTAVYYCSRWGGDGFYAMDYWGQGTLVTVSSASTKGPSVFPLAPSSKSTSGGTAALGCLVKDYFPEPVTVSWNSGALTSGVHTFPAVLQSSGLYSLSSTVTVPSSSLGTQTYICNVNHKPSNTKVDKKVEP

SEQ ID NO: 958 - protein, 233 aa, synthetic construct
  REGION 1..233: note = Description of Artificial Sequence: Synthetic antibody variable domain
MGWSCIILFLVATATGVHSDIQMTQSPSSLSASVGDRVTITCKASQDVSIGVAWYQQKPGKAPKLLIYSASYRYTGVPSRFSGSGSGTDFTLTISSLQPEDFATYYCQQYYIYPYTFGQGTKVEIKRTVAAPSVFIFPPSDEQLKSGTASVVCLLNNFYPREAKVQWKVDNALQSGNSQESVTEQDSKDSTYSLSSTLTLSKADYEKHKVYACEVTHQGLSSPVTKSFNRGEC

SEQ ID NO: 959 - protein, 467 aa, synthetic construct
  REGION 1..467: note = Description of Artificial Sequence: Synthetic antibody variable domain
MGWSCIILFLVATATGVHSEVQLVESGGGLVQPGGSLRLSCAASGFTFTDYTMDWVRQAPGKGLEWVADVNPNSGGSIYNQRFKGRFTLSVDRSKNTLYLQMNSLRAEDTAVYYCARNLGPSFYFDYWGQGTLVTVSSASTKGPSVFPLAPSSKSTSGGTAALGCLVKDYFPEPVTVSWNSGALTSGVHTFPAVLQSSGLYSLSSVVTVPSSSLGTQTYICNVNHKPSNTKVDKKVEPKSCDKTHTCPPCPAPELLGGPSVFLFPPKPKDTLMISRTPEVTCVVVDVSHEDPEVKFNWYVDGVEVHNAKTKPREEQYNSTYRVVSVLTVLHQDWLNGKEYKCKVSNKALPAPIEKTISKAKGQPREPQVYTLPPSREEMTKNQVSLTCLVKGFYPSDIAVEWESNGQPENNYKTTPPVLDSDGSFFLYSKLTVDKSRWQQGNVFSCSVMHEALHNHYTQKSLSLSPG

SEQ ID NO: 960 - protein, 219 aa, synthetic construct
  REGION 1..219: note = Description of Artificial Sequence: Synthetic antibody variable domain
DIQMTQSPSSLSASVGDRVTITCRASQDVNTAVAWYQQKPGKAPKLLIYSASFLYSGVPSRFSGSRSGTDFTLTISSLQPEDFATYYCQQHYTTPPTFGQGTKVEIKKLEIKRTVAAPSVFIFPPSDEQLKSGTASVVCLLNNFYPREAKVQWKVDNALQSGNSQESVTEQDSKDSTYSLSSTLTLSKADYEKHKVYACEVTHQGLSSPVTKSFNRGEC

SEQ ID NO: 961 - protein, 234 aa, synthetic construct
  REGION 1..234: note = Description of Artificial Sequence: Synthetic antibody variable domain
QVQLLEEVQLVESGGGLVQPGGSLRLSCAASGFNIKDTYIHWVRQAPGKGLEWVARIYPTNGYTRYADSVKGRFTISADTSKNTAYLQMNSLRAEDTAVYYCSRWGGDGFYAMDYWGQGTLVTVSSGAQSVFPLAPSSKSTSGGTAALGCLVKDYFPEPVTVSWNSGALTSGVHTFPAVLQSSGLYSLSSVVTVPSSSLGTQTYICNVNHKPSNTKVDKKVEPKSCDKHHHHHH

SEQ ID NO: 962 - protein, 450 aa, synthetic construct
  REGION 1..450: note = Description of Artificial Sequence: Synthetic antibody variable domain
EVQLVESGGGLVQPGGSLRLSCAASGFNIKDTYIHWVRQAPGKGLEWVARIYPTNGYTRYADSVKGRFTISADTSKNTAYLQMNSLRCEDTAVYYCSRWGGDGFYAMDYWGQGTLVTVSSASTKGPSVFPLAPSSKSTSGGTAALGCLVKDYFPEPVTVSWNSGALTSGVHTFPAVLQSSGLYSLSSVVTVPSSSLGTQTYICNVNHKPSNTKVDKKVEPKSCDKTHTCPPCPAPELLGGPSVFLFPPKPKDTLMISRTPEVTCVVVDVSHEDPEVKFNWYVDGVEVHNAKTKPREEQYNSTYRVVSVLTVLHQDWLNGKEYKCKVSNKALPAPIEKTISKAKGQPREPQVYTLPPSREEMTKNQVSLTCLVKGFYPSDIAVEWESNGQPENNYKTTPPVLDSDGSFFLYSKLTVDKSRWQQGNVFSCSVMHEALHNHYTQKSLSLSPGK

SEQ ID NO: 963 - protein, 450 aa, synthetic construct
  REGION 1..450: note = Description of Artificial Sequence: Synthetic antibody variable domain
EVQLVESGGGLVQPGGSLRLSCAASGFNIKDTYIHWVRQAPGKGLEWVARIYPTNGYTRYADSVKGRFTISADTSKNTAYLQMNSLRAEDTAVYYCSRWGGDGFYAMDYWGQGTLVTVSSCSTKGPSVFPLAPSSKSTSGGTAALGCLVKDYFPEPVTVSWNSGALTSGVHTFPAVLQSSGLYSLSSVVTVPSSSLGTQTYICNVNHKPSNTKVDKKVEPKSCDKTHTCPPCPAPELLGGPSVFLFPPKPKDTLMISRTPEVTCVVVDVSHEDPEVKFNWYVDGVEVHNAKTKPREEQYNSTYRVVSVLTVLHQDWLNGKEYKCKVSNKALPAPIEKTISKAKGQPREPQVYTLPPSREEMTKNQVSLTCLVKGFYPSDIAVEWESNGQPENNYKTTPPVLDSDGSFFLYSKLTVDKSRWQQGNVFSCSVMHEALHNHYTQKSLSLSPGK

SEQ ID NO: 964 - protein, 214 aa, synthetic construct
  REGION 1..214: note = Description of Artificial Sequence: Synthetic antibody variable domain
DIQMTQSPSSLSASVGDRVTITCRASQDVNTAVAWYQQKPGKAPKLLIYSASFLYSGVPSRFSGSRSGTDFTLTISSLQPEDFATYYCQQHYTTPPTFGQGTKVEIKRTCAAPSVFIFPPSDEQLKSGTASVVCLLNNFYPREAKVQWKVDNALQSGNSQESVTEQDSKDSTYSLSSTLTLSKADYEKHKVYACEVTHQGLSSPVTKSFNRGEC

SEQ ID NO: 965 - protein, 129 aa, synthetic construct
  REGION 1..129: note = Description of Artificial Sequence: Synthetic antibody variable domain
QVQLVQSGAEVKKPGESLKISCKGSGYSFTSYWIAWVRQMPGKGLEYMGLIYPGDSDTKYSPSFQGQVTISVDKSVSTAYLQWSSLKPSDSAVYFCARHDVGYCTDRTCAKWPEWLGVWGQGTLVTVSS

SEQ ID NO: 966 - protein, 111 aa, synthetic construct
  REGION 1..111: note = Description of Artificial Sequence: Synthetic antibody variable domain
QSVLTQPPSVSAAPGQKVTISCSGSSSNIGNNYVSWYQQLPGTAPKLLIYDHTNRPAGVPDRFSGSKSGTSASLAISGFRSEDEADYYCASWDYTLSGWVFGGGTKVTVLG

SEQ ID NO: 967 - protein, 121 aa, synthetic construct
  REGION 1..121: note = Description of Artificial Sequence: Synthetic antibody variable domain
EVQLLEWGPGLVKPSGTLSLTCAVSGGSIRDSNWWGWVRQPPGKGLEWIGEIYHSGTTNYNPSLKSRVTISVDKSKNQFSLNLSSVTAADTAVYYCAREDCSYGSCYFDYWGQGTLVTVSS

SEQ ID NO: 968 - protein, 107 aa, synthetic construct
  REGION 1..107: note = Description of Artificial Sequence: Synthetic antibody variable domain
ELTLTQSPSSLSASLGDRVTIRCRASQSISAALNWYQQKPGKAPKLLIHDVSTLQSGVPARFSGGGSETDFTLTISSLQPEDFATYYCQQSYRVPLTFGGGTRLEIK

SEQ ID NO: 969 - protein, 451 aa, synthetic construct
  REGION 1..451: note = Description of Artificial Sequence: Synthetic antibody variable domain
EVQLVESGGGLVQPGGSLRLSCAASGFNIKDTYIHWVRQAPGKGLEWVARIYPTNGYTRYADSVKGRFTISADTSKNTAYLQMNSLRAEDTAVYYCSRWGGDGFYAMDYWGQGTLVTVSSASTKGPSVFPLAPSSKSTSGGTAALGCLVKDYFPEPVTVSWNSGALTSGVHTFPAVLQSSGLYSLSSVVTVPSSSLGTQTYICNVNHKPSNTKVDKKVEPPKSCDKTHTCPPCPAPELLGGPSVFLFPPKPKDTLMISRTPEVTCVVVDVSHEDPEVKFNWYVDGVEVHNAKTKPREEQYNSTYRVVSVLTVLHQDWLNGKEYKCKVSNKALPAPIEKTISKAKGQPREPQVYTLPPSRDELTKNQVSLTCLVKGFYPSDIAVEWESNGQPENNYKTTPPVLDSDGSFFLYSKLTVDKSRWQQGNVFSCSVMHEALHNHYTQKSLSLSPGK

SEQ ID NO: 970 - protein, 469 aa, synthetic construct
  REGION 1..469: note = Description of Artificial Sequence: Synthetic antibody variable domain
MECSWVMLFLLSVTAGVHSEVQLVESGGGLVQPGGSLRLSCAASGFNIKDTYIHWVRQAPGKGLEWVARIYPTNGYTRYADSVKGRFTISADTSKNTAYLQMNSLRAEDTAVYYCSRWGGDGFYAMDYWGQGTLVTVSSASTKGPSVFPLAPSSKSTSGGTAALGCLVKDYFPEPVTVSWNSGALTSGVHTFPAVLQSSGLYSLSSVVTVPSSSLGTQTYICNVNHKPSNTKVDKKVEPKSCDKTHTCPPCPAPELLGGPSVFLFPPKPKDTLMISRTPEVTCVVVDVSHEDPEVKFNWYVDGVEVHNAKTKPREEQYNSTYRVVSVLTVLHQDWLNGKEYKCKVSNKALPAPIEKTISKAKGQPREPQVYTLPPSRDELTKNQVSLTCLVKGFYPSDIAVEWESNGQPENNYKTTPPVLDSDGSFFLYSKLTVDKSRWQQGNVFSCSVMHEALHNHYTQKSLSLSPGK

SEQ ID NO: 971 - protein, 233 aa, synthetic construct
  REGION 1..233: note = Description of Artificial Sequence: Synthetic antibody variable domain
MEWSCVMLFLLSVTAGVHSDIQMTQSPSSLSASVGDRVTITCRASQDVNTAVAWYQQKPGKAPKLLIYSASFLYSGVPSRFSGSRSGTDFTLTISSLQPEDFATYYCQQHYTTPPTFGQGTKVEIKRTVAAPSVFIFEPSDEQLKSGTASVVCLLNNFYPREAKVQWKVDNALQSGNSQESVTEQDSKDSTYSLSSTLTLSKADYEKHKVYACEVTHQGLSSPVTKSFNRGEC

SEQ ID NO: 972 - protein, 450 aa, synthetic construct
  REGION 1..450: note = Description of Artificial Sequence: Synthetic antibody variable domain
EVQLVESGGGLVQPGGSLRLSCAASGFNIKDTYIHWVRQAPGKGLEWVARIYPTNGYTRYADSVKGRFTISADTSKNTAYLQMNSLRAEDTAVYYCSRWGGDGFYAMDYWGQGTLVTVSSASTKGPSVFPLAPSSKSTSGGTAALGCLVKDYFPEPVTVSWNSGALTSGVHTFPAVLQSSGLYSLSSVVTVPSSSLGTQTYICNVNHKPSNTKVDKKVEPKSCDKTHTCPPCPAPELLGGPSVFLFPPKPKDTLMISRTPEVTCVVVDVSHEDPEVKFNWYVDGVEVHNAKTKPREEQYNSTYRVVSVLTVLHQDWLNGKEYKCKVSNKALPAPIEKTISKAKGQPREPQVYTLPPSRDELTKNQVSLTCLVKGFYPSDIAVEWESNGQPENNYKTTPPVLDSDGSFFLYSKLTVDKSRWQQGNVFSCSVMHEALHNHYTQKSLSLSPGK

SEQ ID NO: 973 - protein, 263 aa, synthetic construct
  REGION 1..263: note = Description of Artificial Sequence: Synthetic scFv sequence
MAVLGLLFCLVTFPSCVLSQVQVKESGPFLVPPSQSLSITCTVSGFSLTTYGVSWIRQPPGKGLEWLGAIWGDGTTNYHSALISRLSISKDNSKSQVFLKLNSLQTDDTATYYCAKLGNYDALDYWGQGTSVTVSSGGGGSGGGGSGGGGSDVLMTQTPLSLPVSLGDQASISCRSSQSIVHSNGNTYLEWYLQKPGQSPNLLIYFVSNRFSGVPDRFSGSGSGTDFTLKISRVEAEDLGVYYCFQGSHVPWTFGGGTKLEIK

SEQ ID NO: 974 - protein, 242 aa, synthetic construct
  REGION 1..242: note = Description of Artificial Sequence: Synthetic scFv sequence
QVQLVESGGGLVQPGGSLRLSCAASGFTFSSYAMGWVRQAPGKGLEWVSSISGSSRYIYYADSVKGRFTISRDNSKNTLYLQMNSLRAEDTAVYYCAKMDASGSYFNFWGQGTLVTVSSGGGGSGGGGSGGGGSETTLTQSPSFLSAFVGDRITITCRASPGIRNYLAWYQQKPGKAPKLLIYAASTLQSGVPSRFSGSGSGTDFTLTISSLQPEDFATYYCQQYNSYPLSFGGGTKVEIKR

SEQ ID NO: 975 - protein, 477 aa, synthetic construct
  REGION 1..477: note = Description of Artificial Sequence: Synthetic scFv sequence
QVQLQQSGAELARPGASVKMSCKASGYTFTRYTMHWVKQRPGQGLEWIGYINPSRGYTNYNQKFKDKATLTTDKSSSTAYMQLSSLTSEDSAVYYCARYYDDHYCLDYWGQGTTLTVSSGGGGSGGGGSGGGGSQIVLTQSPAIMSASPGEKVTMTCSASSSVSYMNWYQQKSGTSPKRWIYDTSKLASGVPAHFRGSGSGTSYSLTISGMEAEDAATYYCQQWSSNPFTFGSGTKLEINRGAAAEPKSCDKTHTCPPCPAPELLGGPSVFLFPPKPKDTLMISRTPEVTCVVVDVSHEDPEVKFNWYVDGVEVHNAKTKPREEQYNSTYRVVSVLTVLHQDWLNGKEYKCKVSNKALPAPIEKTISKAKGQPREPQVYTLPPSRDELTKNQVSLTCLVKGFYPSDIAVEWESNGQPENNYKTTPPVLDSDGSFFLYSKLTVDKSRWQQGNVFSCSVMHEALHNHYTQKSLSLSPGK

SEQ ID NO: 976 - protein, 291 aa, synthetic construct
  REGION 1..291: note = Description of Artificial Sequence: Synthetic scFv sequence
MKYLLPTAAAGLLLLAAQPAMAQVQLVESGGGLVQPGGSLRLSCAASGFTFRSYAMSWVRQAPGKGLEWVSAISGRGDNTYYADSVKGRFTISRDNSKNTLYLQMNSLRAEDTAVYYCAKMTSNAFAFDYWGQGTLVTVSSGGGGSGGGGSGGGGSQSVLTQPPSVSGAPGQRVTISCTGSSSNIGAGYGVHWYQQLPGTAPKLLIYGNTNRPSGVPDRFSGFKSGTSASLAITGLQAEDEADYYCQSYDSSLSGWVFGGGTKLTVLGAAAEQKLISEEDLNGAAHHHHHH

SEQ ID NO: 977 - protein, 291 aa, synthetic construct
  REGION 1..291: note = Description of Artificial Sequence: Synthetic scFv sequence
MKYLLPTAAAGLLLLAAQPAMAQVQLVQSGGGLVQPGRSLRLSCAASGFTFDDYAMHWVRQAPGKGLEWVSGISWNSGSIGYADSVKGRFTISRDNAKNSLYLQMNSLRPEDTAVYYCARDLGAKQWLEGFDYWGQGTLVTVSSGGGGSGGGGSGGGGSNFMLTQDPAVSVALGQTVRITCQGDSLRSYYASWYQQKPGQAPVLVIYGKNNRPSGIPDRFSGSTSGNSASLTITGAQAEDEADYYCNSRDSSGNHWVFGGGTKVTVLGAAAEQKLISEEDLNGAAHHHHHH

SEQ ID NO: 978 - protein, 665 aa, synthetic construct
  REGION 1..665: note = Description of Artificial Sequence: Synthetic scFv sequence
MTVLAPAWSPTTYLLLLLLLSSGLSGTQDCSFQHSPISSDFAVKIRELSDYLLQDYPVTVASNLQDEELCGGLWRLVLAQRWMERLKTVAGSKMQGLLERVNTEIHFVTKCAFQPPPSCLRFVQTNISRLLQETSEQLVALKPWITRQNFSRCLELQCQPDSSTLPPPWSPRPLEATAPTAPEPKSCDKTHTCPPCPAPELLGGPSVFLFPPKPKDTLMISRTPEVTCVVVDVSHEDPEVKFNWYVDGVEVHNAKTKPREEQYNSTYRVVSVLTVLHQDWLNGKEYKCKVSNKALPAPIEKTISKAKGQPREPQVYTLPPSRDELTKNQVSLTCLVKGFYPSDIAVEWESNGQPENNYKTTPPVLDSDGSFFLYSKLTVDKSRWQQGNVFSCSVMHEALHNHYTQKSLSLSPGKEVQLVESGGGLVQPGGSLRLSCAASGFNIKDTYIHWVRQAPGKGLEWVARIYPTNGYTRYADSVKGRFTISADTSKNTAYLQMNSLRAEDTAVYYCSRWGGDGFYAMDYWGQGTLVTVSSASTKGPSVGGGGSGGGGSGGGGSDIQMTQSPSSLSASVGDRVTITCRASQDVNTAVAWYQQKPGKAPKLLIYSASFLYSGVPSRFSGSRSGTDFTLTISSLQPEDFATYYCQQHYTTPPTFGQGTKVEIKR

SEQ ID NO: 979 - protein, 278 aa, synthetic construct
  REGION 1..278: note = Description of Artificial Sequence: Synthetic scFv sequence
MRFSTTLATAATALFFTASQVSAEVQLVESGGGLVQPGGSLRLSCAASGFNIKDTYIHWVRQAPGKGLEWVARIYPTNGYTRYADSVKGRFTISADTSKNTAYLQMNSLRAEDTAVYYCSRWGGDGFYAMDYWGQGTLVTVSSGGGGSGGGGSGGGGSGGGGSDIQMTQSPSSLSASVGDRVTITCRASQDVNTAVAWYQQKPGKAPKLLIYSASFLYSGVPSRFSGSRSGTDFTLTISSLQPEDFATYYCQQHYTTPPTFGQGTKVEIKSGHHHHHH

SEQ ID NO: 980 - protein, 280 aa, synthetic construct
  REGION 1..280: note = Description of Artificial Sequence: Synthetic scFv sequence
MRFSTTLATAATALFFTASQVSAGHHHHHHSGEVQLVESGGGLVQPGGSLRLSCAASGFNIKDTYIHWVRQAPGKGLEWVARIYPTNGYTRYADSVKGRFTISADTSKNTAYLQMNSLRAEDTAVYYCSRWGGDGFYAMDYWGQGTLVTVSSGGGGSGGGGSGGGGSGGGGSDIQMTQSPSSLSASVGDRVTITCRASQDVNTAVAWYQQKPGKAPKLLIYSASFLYSGVPSRFSGSRSGTDFTLTISSLQPEDFATYYCQQHYTTPPTFGQGTKVEIKS

SEQ ID NO: 981 - protein, 114 aa, Homo sapiens; identical to SEQ ID NO: 480

SEQ ID NO: 982 - protein, 98 aa, Homo sapiens; identical to SEQ ID NO: 481

SEQ ID NO: 983 - protein, 112 aa, Homo sapiens; identical to SEQ ID NO: 482

SEQ ID NO: 984 - protein, 173 aa, Homo sapiens; identical to SEQ ID NO: 483

SEQ ID NO: 985 - protein, 113 aa, Homo sapiens; identical to SEQ ID NO: 484

SEQ ID NO: 986 - protein, 60 aa, Homo sapiens; identical to SEQ ID NO: 485

SEQ ID NO: 987 - protein, 114 aa, Homo sapiens; identical to SEQ ID NO: 486

SEQ ID NO: 988 - protein, 113 aa, Homo sapiens; identical to SEQ ID NO: 487

SEQ ID NO: 989 - protein, 22 aa, Homo sapiens
EGLYNELQKDKMAEAYSEIGMK

SEQ ID NO: 990 - protein, 112 aa, Homo sapiens; identical to SEQ ID NO: 419

SEQ ID NO: 991 - protein, 110 aa, Homo sapiens; identical to SEQ ID NO: 493

SEQ ID NO: 992 - protein, 137 aa, Homo sapiens; identical to SEQ ID NO: 494

SEQ ID NO: 993 - protein, 163 aa, Homo sapiens; identical to SEQ ID NO: 472

SEQ ID NO: 994 - protein, 38 aa, Homo sapiens; identical to SEQ ID NO: 496

SEQ ID NO: 995 - protein, 226 aa, Homo sapiens; identical to SEQ ID NO: 497

SEQ ID NO: 996 - protein, 188 aa, Homo sapiens; identical to SEQ ID NO: 498

SEQ ID NO: 997 - protein, 21 aa, Homo sapiens
ENLYEGLNLDDCSMYEDISRG

SEQ ID NO: 998 - protein, 84 aa, Homo sapiens; identical to SEQ ID NO: 501

SEQ ID NO: 999 - protein, 84 aa, Homo sapiens; identical to SEQ ID NO: 502

SEQ ID NO: 1000 - protein, 47 aa, Homo sapiens; identical to SEQ ID NO: 503

SEQ ID NO: 1001 - protein, 41 aa, Homo sapiens; identical to SEQ ID NO: 504

SEQ ID NO: 1002 - protein, 47 aa, Homo sapiens; identical to SEQ ID NO: 505

SEQ ID NO: 1003 - protein, 20 aa, Homo sapiens
RPRRSPAQDGKVYINMPGRG

SEQ ID NO: 1004 - protein, 113 aa, Homo sapiens; identical to SEQ ID NO: 507

SEQ ID NO: 1005 - protein, 112 aa, Homo sapiens; identical to SEQ ID NO: 508

SEQ ID NO: 1006 - protein, 102 aa, Homo sapiens; identical to SEQ ID NO: 509

SEQ ID NO: 1007 - protein, 101 aa, Homo sapiens; identical to SEQ ID NO: 510

SEQ ID NO: 1008 - protein, 113 aa, Homo sapiens; identical to SEQ ID NO: 507

SEQ ID NO: 1009 - protein, 112 aa, Homo sapiens; identical to SEQ ID NO: 508

SEQ ID NO: 1010 - protein, 102 aa, Homo sapiens; identical to SEQ ID NO: 509

SEQ ID NO: 1011 - protein, 101 aa, Homo sapiens; identical to SEQ ID NO: 510

SEQ ID NO: 1012 - protein, 21 aa, Homo sapiens
ESPYQELQGQRSDVYSDLNTQ

SEQ ID NO: 1013 - protein, 49 aa, Homo sapiens; identical to SEQ ID NO: 517

SEQ ID NO: 1014 - protein, 35 aa, Homo sapiens; identical to SEQ ID NO: 518

SEQ ID NO: 1015 - protein, 39 aa, Homo sapiens; identical to SEQ ID NO: 519

SEQ ID NO: 1016 - protein, 149 aa, Homo sapiens; identical to SEQ ID NO: 520

SEQ ID NO: 1017 - protein, 619 aa, Homo sapiens; identical to SEQ ID NO: 521

SEQ ID NO: 1018 - protein, 180 aa, Homo sapiens; identical to SEQ ID NO: 522

SEQ ID NO: 1019 - protein, 240 aa, Homo sapiens; identical to SEQ ID NO: 523

SEQ ID NO: 1020 - protein, 86 aa, Homo sapiens; identical to SEQ ID NO: 524

SEQ ID NO: 1021 - protein, 21 aa, Homo sapiens
DGVYTGLSTRNQETYETLKHE

SEQ ID NO: 1022 - protein, 66 aa, Homo sapiens; identical to SEQ ID NO: 526

SEQ ID NO: 1023 - protein, 40 aa, Homo sapiens; identical to SEQ ID NO: 451

SEQ ID NO: 1024 - protein, 67 aa, Homo sapiens
IEVMYPPPYLDNEKSNGTIIHVKGKHLCPSPLFPGPSKPFWVLVVVGGVLACYSLLVTVAFIIFWVR

SEQ ID NO: 1025 - protein, 84 aa, Homo sapiens; identical to SEQ ID NO: 501

SEQ ID NO: 1026 - protein, 219 aa, synthetic construct
  REGION 1..219: note = Description of Artificial Sequence: Synthetic polypeptide
IEVMYPPPYLDNEKSNGTIIHVKGKHLCPSPLFPGPSKPFWVLVVVGGVLACYSLLVTVAFIIFWVRSKRSRLLHSDYMNMTPRRPGPTRKHYQPYAPPRDFAAYRSRVKFSRSADAPAYQQGQNQLYNELNLGRREEYDVLDKRRGRDPEMGGKPRRKNPQEGLYNELQKDKMAEAYSEIGMKGERRRGKGHDGLYQGLSTATKDTYDALHMQALPPR

SEQ ID NO: 1027 - protein, 283 aa, synthetic construct
  REGION 1..283: note = Description of Artificial Sequence: Synthetic polypeptide
FVPVFLPAKPTTTPAPRPPTPAPTIASQPLSLRPEACRPAAGGAVHTRGLDFACDIYIWAPLAGTCGVLLLSLVITLYCNHRNRSKRSRLLHSDYMNMTPRRPGPTRKHYQPYAPPRDFAAYRSRFSVVKRGRKKLLYIFKQPFMRPVQTTQEEDGCSCRFPEEEEGGCELRVKFSRSADAPAYQQGQNQLYNELNLGRREEYDVLDKRRGRDPEMGGKPRRKNPQEGLYNELQKDKMAEAYSEIGMKGERRRGKGHDGLYQGLSTATKDTYDALHMQALPPR

SEQ ID NO: 1028 - protein, 46 aa, Homo sapiens; identical to SEQ ID NO: 528

SEQ ID NO: 1029 - protein, 31 aa, Homo sapiens; identical to SEQ ID NO: 529

SEQ ID NO: 1030 - protein, 27 aa, Homo sapiens
IISFFLALTSTALLFLLFFLTLRFSVV

SEQ ID NO: 1031 - protein, 26 aa, Homo sapiens
VAAILGLGLVLGLLGPLAILLALYLL

SEQ ID NO: 1032 - protein, 363 aa, Homo sapiens; identical to SEQ ID NO: 532

SEQ ID NO: 1033 - protein, 21 aa, Homo sapiens
AVFGCIFGALVIVTVGGFIFW

SEQ ID NO: 1034 - protein, 185 aa, Homo sapiens; identical to SEQ ID NO: 534

SEQ ID NO: 1035 - protein, 106 aa, Homo sapiens; identical to SEQ ID NO: 535

SEQ ID NO: 1036 - protein, 27 aa, Homo sapiens
FWVLVVVGGVLACYSLLVTVAFIIFWV

SEQ ID NO: 1037 - protein, 66 aa, Homo sapiens; identical to SEQ ID NO: 537

SEQ ID NO: 1038 - protein, 33 aa, Homo sapiens; identical to SEQ ID NO: 538

SEQ ID NO: 1039 - protein, 68 aa, Homo sapiens; identical to SEQ ID NO: 449

SEQ ID NO: 1040 - protein, 28 aa, Homo sapiens
MFWVLVVVGGVLACYSLLVTVAFIIFWV

SEQ ID NO: 1041 - protein, 26 aa, Homo sapiens
FWVLVVVGGVLACYSLLVTVAFHFWV

SEQ ID NO: 1042 - protein, 28 aa, Homo sapiens
MFWVLVVVGGVLACYSGGVTVAFIIFWV

SEQ ID NO: 1043 - protein, 26 aa, Homo sapiens
WVLVVVGGVLACYSLLVTVAFIIFWV

SEQ ID NO: 1044 - protein, 69 aa, Homo sapiens; identical to SEQ ID NO: 544

SEQ ID NO: 1045 - protein, 180 aa, Homo sapiens; identical to SEQ ID NO: 545

SEQ ID NO: 1046 - protein, 216 aa, Homo sapiens; identical to SEQ ID NO: 546

SEQ ID NO: 1047 - protein, 140 aa, Homo sapiens; identical to SEQ ID NO: 547

SEQ ID NO: 1048 - protein, 222 aa, Homo sapiens; identical to SEQ ID NO: 454

SEQ ID NO: 1049 - protein, 23 aa, Homo sapiens
LCYLLDGILFIYGVILTALFLRV

SEQ ID NO: 1050 - protein, 51 aa, Homo sapiens; identical to SEQ ID NO: 550

SEQ ID NO: 1051 - protein, 21 aa, Homo sapiens
LCYLLDGILFIYGVILTALFL

SEQ ID NO: 1052 - protein, 25 aa, Homo sapiens
ALIVLGGVAGLLLFIGLGIFFCVRC

SEQ ID NO: 1053 - protein, 22 aa, Homo sapiens
MALIVLGGVAGLLLFIGLGIFF

SEQ ID NO: 1054 - protein, 725 aa, Homo sapiens; identical to SEQ ID NO: 554

SEQ ID NO: 1055 - protein, 23 aa, Homo sapiens
PLFIPVAVMVTAFSGLAFIIWLA

SEQ ID NO: 1056 - protein, 24 aa, Homo sapiens
ALPAALAVISFLLGLGLGVACVLA

SEQ ID NO: 1057 - protein, 21 aa, Homo sapiens
MALPVTALLLPLALLLHAARP

SEQ ID NO: 1058 - protein, 286 aa, Homo sapiens; identical to SEQ ID NO: 558

SEQ ID NO: 1059 - protein, 226 aa, Homo sapiens; identical to SEQ ID NO: 559

SEQ ID NO: 1060 - protein, 83 aa, Homo sapiens; identical to SEQ ID NO: 560

SEQ ID NO: 1061 - protein, 22 aa, Homo sapiens
IWAPLAGTCGVLLLSLVITLYC

SEQ ID NO: 1062 - protein, 24 aa, Homo sapiens
IYIWAPLAGTCGVLLLSLVITLYC

SEQ ID NO: 1063 - protein, 25 aa, Homo sapiens
IYIWAPLAGTCGVLLLSLVITLYCR

SEQ ID NO: 1064 - protein, 25 aa, Homo sapiens
IYIWAPLAGTCGVLLLSLVITLVCR

SEQ ID NO: 1065 - protein, 21 aa, Homo sapiens
IYIWAPLAGTCGVLLLSLVIT

SEQ ID NO: 1066 - protein, 23 aa, Homo sapiens
IYIWAPLAGTCGVLLLSLVITLY

SEQ ID NO: 1067 - protein, 23 aa, Homo sapiens
LGLLVAGVLVLLVSLGVAIHLCC

SEQ ID NO: 1068 - protein, 101 aa, Homo sapiens; identical to SEQ ID NO: 568

SEQ ID NO: 1069 - protein, 257 aa, Homo sapiens; identical to SEQ ID NO: 570

SEQ ID NO: 1070 - protein, 54 aa, Homo sapiens; identical to SEQ ID NO: 573

SEQ ID NO: 1071 - protein, 31 aa, Homo sapiens; identical to SEQ ID NO: 574

SEQ ID NO: 1072 - protein, 24 aa, Homo sapiens
SIISAVVGILLVVVLGVVFGILII

SEQ ID NO: 1073 - protein, 113 aa, Homo sapiens; identical to SEQ ID NO: 576

SEQ ID NO: 1074 - protein, 21 aa, Homo sapiens
FWLPIGCAAFVVVCILGCILI

SEQ ID NO: 1075 - protein, 233 aa, Homo sapiens; identical to SEQ ID NO: 585

SEQ ID NO: 1076 - protein, 21 aa, Homo sapiens
VAAILGLGLVLGLLGPLAILL

SEQ ID NO: 1077 - protein, 24 aa, Homo sapiens
IYIWAPLAGTCGVLLLSLVITLYC

SEQ ID NO: 1078 - protein, 24 aa, Homo sapiens
IYIWAPLAGTCGVLLLSLVITLYC

SEQ ID NO: 1079 - protein, 5 aa, Homo sapiens
DKTHT

SEQ ID NO: 1080 - protein, 4 aa, Homo sapiens
CPPC

SEQ ID NO: 1081 - protein, 5 aa, Homo sapiens
DKTHT

SEQ ID NO: 1082 - protein, 12 aa, Homo sapiens
ELKTPLGDTTHT

SEQ ID NO: 1083 - protein, 10 aa, Homo sapiens
KSCDKTHTCP

SEQ ID NO: 1084 - protein, 7 aa, Homo sapiens
KCCVDCP

SEQ ID NO: 1085 - protein, 7 aa, Homo sapiens
KYGPPCP

SEQ ID NO: 1086 - protein, 16 aa, Homo sapiens
VEPKSPDKTHTCPPCP

SEQ ID NO: 1087 - protein, 16 aa, Homo sapiens
LDPKSSDKTHTCPPCP

SEQ ID NO: 1088 - protein, 39 aa, Homo sapiens; identical to SEQ ID NO: 599

SEQ ID NO: 1089 - protein, 12 aa, Homo sapiens
GGAVHTRGLDFA

SEQ ID NO: 1090 - protein, 45 aa, Homo sapiens; identical to SEQ ID NO: 601

SEQ ID NO: 1091 - protein, 48 aa, Homo sapiens; identical to SEQ ID NO: 602

SEQ ID NO: 1092 - protein, 79 aa, Homo sapiens; identical to SEQ ID NO: 605

SEQ ID NO: 1093 - protein, 51 aa, Homo sapiens; identical to SEQ ID NO: 606

SEQ ID NO: 1094 - protein, 69 aa, Homo sapiens; identical to SEQ ID NO: 607

SEQ ID NO: 1095 - protein, 44 aa, Homo sapiens; identical to SEQ ID NO: 608

SEQ ID NO: 1096 - protein, 47 aa, Homo sapiens; identical to SEQ ID NO: 609

SEQ ID NO: 1097 - protein, 11 aa, Homo sapiens
LDKTHTCPPCP

SEQ ID NO: 1098 - protein, 101 aa, Homo sapiens; identical to SEQ ID NO: 568

SEQ ID NO: 1099 - protein, 16 aa, Homo sapiens
GLAVSTISSFFPPGYQ

SEQ ID NO: 1100 - protein, 282 aa, Homo sapiens; identical to SEQ ID NO: 614

SEQ ID NO: 1101 - protein, 246 aa, Homo sapiens; identical to SEQ ID NO: 615

SEQ ID NO: 1102 - protein, 45 aa, Homo sapiens; identical to SEQ ID NO: 616

SEQ ID NO: 1103 - protein, 16 aa, Homo sapiens
LEPKSCDKTHTCPPCP

SEQ ID NO: 1104 - protein, 43 aa, Homo sapiens; identical to SEQ ID NO: 618

SEQ ID NO: 1105 - protein, 16 aa, Homo sapiens
ELKTPLGDTHTCPRCP

SEQ ID NO: 1106 - protein, 15 aa, Homo sapiens
EPKSCDTPPPCPRCP

SEQ ID NO: 1107 - protein, 12 aa, Homo sapiens
ESKYGPPCPSCP

SEQ ID NO: 1108 - protein, 12 aa, Homo sapiens
ERKCCVECPPCP

SEQ ID NO: 1109 - protein, 229 aa, Homo sapiens; identical to SEQ ID NO: 624

SEQ ID NO: 1110 - protein, 119 aa, Homo sapiens; identical to SEQ ID NO: 625

SEQ ID NO: 1111 - protein, 282 aa, Homo sapiens; identical to SEQ ID NO: 614

SEQ ID NO: 1112 - protein, 281 aa, Homo sapiens; identical to SEQ ID NO: 627

SEQ ID NO: 1113 - protein, 283 aa, Homo sapiens; identical to SEQ ID NO: 628

SEQ ID NO: 1114 - protein, 58 aa, Homo sapiens; identical to SEQ ID NO: 629

SEQ ID NO: 1115 - protein, 282 aa, Homo sapiens; identical to SEQ ID NO: 614

SEQ ID NO: 1116 - protein, 282 aa, Homo sapiens; identical to SEQ ID NO: 614

SEQ ID NO: 1117 - protein, 281 aa, Homo sapiens
RWPESPKAQASSVPTAQPQAEGSLAKATTAPATTRNTGRGGEEKKKEKEKEEQEERETKTPECPSHTQPLGVYLLTPAVQDLWLRDKATFTCFVVGSDLKDAHLTWEVAGKVPTGGVEEGLLERHSNGSQSQHSRLTLPRSLWNAGTSVTCTLNHPSLPPQRLMALREPAAQAPVKLSLNLLASSDPPEAASWLLCEVSGFSPPNILLMWLEDQREVNTSGFAPARPPQPGSTTFWAWSVLRVPAPPSPQPATYTCVVSHEDSRTLLNASRSLEVSYVTDH

SEQ ID NO: 1118 - protein, 282 aa, Homo sapiens; identical to SEQ ID NO: 614

SEQ ID NO: 1119 - protein, 234 aa, Homo sapiens; identical to SEQ ID NO: 635

SEQ ID NO: 1120 - protein, 20 aa, Homo sapiens
AEPKSPDKTHTCPPCPKDPK

SEQ ID NO: 1121 - protein, 233 aa, Homo sapiens; identical to SEQ ID NO: 638

SEQ ID NO: 1122 - protein, 13 aa, Homo sapiens
SVFLFPPKPKDTL

SEQ ID NO: 1123 - protein, 231 aa, Homo sapiens; identical to SEQ ID NO: 640

SEQ ID NO: 1124 - protein, 235 aa, Homo sapiens; identical to SEQ ID NO: 641

SEQ ID NO: 1125 - protein, 223 aa, Homo sapiens; identical to SEQ ID NO: 642

SEQ ID NO: 1126 - protein, 235 aa, Homo sapiens; identical to SEQ ID NO: 643

SEQ ID NO: 1127 - protein, 17 aa, Homo sapiens
ELKTPLGDTTHTCPRCP

SEQ ID NO: 1128 - protein, 61 aa, Homo sapiens; identical to SEQ ID NO: 646

SEQ ID NO: 1129 - protein, 230 aa, Homo sapiens; identical to SEQ ID NO: 647

SEQ ID NO: 1130 - protein, 230 aa, Homo sapiens; identical to SEQ ID NO: 648

SEQ ID NO: 1131 - protein, 12 aa, Homo sapiens
SPNMVPHAHHAQ

SEQ ID NO: 1132 - protein, 107 aa, Homo sapiens; identical to SEQ ID NO: 650

SEQ ID NO: 1133 - protein, 129 aa, Homo sapiens; identical to SEQ ID NO: 651

SEQ ID NO: 1134 - protein, 229 aa, Homo sapiens; identical to SEQ ID NO: 653

SEQ ID NO: 1135 - protein, 229 aa, Homo sapiens; identical to SEQ ID NO: 653

SEQ ID NO: 1136 - DNA, 36 bp, Homo sapiens; identical to SEQ ID NO: 655
  source 1..36: mol_type = other DNA

SEQ ID NO: 1137 - protein, 12 aa, Homo sapiens
ESKYGPPCPPCP

SEQ ID NO: 1138 - protein, 9 aa, Homo sapiens
YGPPCPPCP

SEQ ID NO: 1139 - protein, 10 aa, Homo sapiens
KYGPPCPPCP

SEQ ID NO: 1140 - protein, 13 aa, Homo sapiens
EVVKYGPPCPPCP

SEQ ID NO: 1141 - protein, 229 aa, Homo sapiens; identical to SEQ ID NO: 664

SEQ ID NO: 1142 - protein, 22 aa, Homo sapiens
ESKYGPPCPPCPGGGSSGGGSG

SEQ ID NO: 1143 - protein, 231 aa, Homo sapiens; identical to SEQ ID NO: 666

SEQ ID NO: 1144 - protein, 231 aa, Homo sapiens; identical to SEQ ID NO: 667

SEQ ID NO: 1145 - protein, 236 aa, Homo sapiens
EPKSCDKTHTCPPCPAPELLGGPSVFLFPPKPKDTLMISRTPEVTCVVVDVSHEDPEVKFNWYVDGVEVHNAKTKPREEQYNSTYRVVSVLTVLHQDWLNGKEYKCKVSNKALPAPIEKTISKAKGQPREPQVYTLPPSRDELTKNQVSLTCLVKGFYPSDIAVEWESNGQPENNYKTTPPVLDSDGSFFLYSKLTVDKSRWQQGNVFSCSVMHEALHNHYTQKSLSLSPGKKDPK

SEQ ID NO: 1146 - protein, 268 aa, synthetic construct
  REGION 1..268: note = Description of Artificial Sequence: Synthetic construct
MYRMQLLSCIALSLALVTNSEFSTEFGVQVETISPGDGRTFPKRGQTCVVHYTGMLEDGKKVDSSRDRNKPFKFMLGKQEVIRGWEEGVAQMSVGQRAKLTISPDYAYGATGHPGIIPPHATLVFDVELLKPEMHAPTSSSTKKTQLQLEHLLLDLQMILNGINNYKNPKLTRMLTFKFYMPKKATELKHLQCLEEELKPLEEVLNLAQSKNFHLRPRDLISNINVIVLELKGSETTFMCEYADETATIVEFLNRWITFCQSIISTLT

SEQ ID NO: 1147 - protein, 153 aa, synthetic construct
  REGION 1..153: note = Description of Artificial Sequence: Synthetic construct
MYRMQLLSCIALSLALVTNSAPTSSSTKKTQLQLEHLLLDLQMILNGINNYKNPKLTRMLTFKFYMPKKATELKHLQCLEEELKPLEEVLNLAQSKNFHLRPRDLISNINVIVLELKGSETTFMCEYADETATIVEFLNRWITFCQSIISTLT

SEQ ID NO: 1148 - protein, 319 aa, synthetic construct
  REGION 1..319: note = Description of Artificial Sequence: Synthetic construct
MYRMQLLSCIALSLALVTNSEFSTEFISLIAALAVDYVIGMENAMPWNLPADLAWFKRNTLNKPVIMGRHTWESIGRPLPGRKNIILSSQPGTDDRVTWVKSVDEAIAACGDVPEIMVIGGGRVIEQFLPKAQKLYLTHIDAEVEGDTHFPDYEPDDWESVFSEFHDADAQNSHSYCFEILERRMHAPTSSSTKKTQLQLEHLLLDLQMILNGINNYKNPKLTRMLTFKFYMPKKATELKHLQCLEEELKPLEEVLNLAQSKNFHLRPRDLISNINVIVLELKGSETTFMCEYADETATIVEFLNRWITFCQSIISTLT

SEQ ID NO: 1149 - protein, 528 aa, synthetic construct
  REGION 1..528: note = Description of Artificial Sequence: Synthetic payload sequence
MGVQVETISPGDGRTFPKRGQTCVVHYTGMLEDGKKVDSSRDRNKPFKFMLGKQEVIRGWEEGVAQMSVGQRAKLTISPDYAYGATGHPGIIPPHATLVFDVELLKPESGGGSDEADRRLLRRCRLRLVEELQVDQLWDALLSRELFRPHMIEDIQRAGSGSRRDQARQLIIDLETRGSQALPLFISCLEDTGQDMLASFLRTNRQAAKLSKPTLENLTPVVLRPEIRKPEVLRPETPRPVDIGSGGFGDVGALESLRGNADLAYILSMEPCGHCLIINNVNFCRESGLRTRTGSNIDCEKLRRRFSSLHFMVEVKGDLTAKKMVLALLELAQQDHGALDCCVVVILSHGCQASHLQFPGAVYGTDGCPVSVEKIVNIFNGTSCPSLGGKPKLFFIQACGGEQKDHGFEVASTSPEDESPGSNPEPDATPFQEGLRTFDQLDAISSLPTPSDIFVSYSTFPGFVSWRDPKSGSWYVETLDDIFEQWAHSEDLQSLLLRVANAVSVKGIYKQMPGCFNFLRKKLFFKTS

SEQ ID NO: 1150 - protein, 579 aa, synthetic construct
  REGION 1..579: note = Description of Artificial Sequence: Synthetic payload sequence
MISLIAALAVDYVIGMENAMPWNLPADLAWFKRNTLNKPVIMGRHTWESIGRPLPGRKNIILSSQPGTDDRVTWVKSVDEAIAACGDVPEIMVIGGGRVIEQFLPKAQKLYLTHIDAEVEGDTHFPDYEPDDWESVFSEFHDADAQNSHSYCFEILERRSGGGSDEADRRLLRRCRLRLVEELQVDQLWDALLSRELFRPHMIEDIQRAGSGSRRDQARQLIIDLETRGSQALPLFISCLEDTGQDMLASFLRTNRQAAKLSKPTLENLTPVVLRPEIRKPEVLRPETPRPVDIGSGGFGDVGALESLRGNADLAYILSMEPCGHCLIINNVNFCRESGLRTRTGSNIDCEKLRRRFSSLHFMVEVKGDLTAKKMVLALLELAQQDHGALDCCVVVILSHGCQASHLQFPGAVYGTDGCPVSVEKIVNIFNGTSCPSLGGKPKLFFIQACGGEQKDHGFEVASTSPEDESPGSNPEPDATPFQEGLRTFDQLDAISSLPTPSDIFVSYSTFPGFVSWRDPKSGSWYVETLDDIFEQWAHSEDLQSLLLRVANAVSVKGIYKQMPGCFNFLRKKLFFKTS

SEQ ID NO: 1151 - protein, 607 aa, synthetic construct
  REGION 1..607: note = Description of Artificial Sequence: Synthetic payload sequence
MVGSLNCIVAVSQNMGIGKNGDLPWPPLRNEFRYFQRMTTTSSVEGKQNLVIMGKKTWFSIPEKNRPLKGRINLVLSRELKEPPQGAHFLSRSLDDALKLTEQPELANKVDMVWIVGGSSVIKEAMNHPGHLKLFVTRIMQDFESDTFFPEIDLEKYKLLPEYPGVLSDVQEEKGIKYKFEVYEKNDSGGGSDEADRRLLRRCRLRLVEELQVDQLWDALLSRELFRPHMIEDIQRAGSGSRRDQARQLIIDLETRGSQALPLFISCLEDTGQDMLASFLRTNRQAAKLSKPTLENLTPVVLRPEIRKPEVLRPETPRPVDIGSGGFGDVGALESLRGNADLAYILSMEPCGHCLIINNVNFCRESGLRTRTGSNIDCEKLRRRFSSLHFMVEVKGDLTAKKMVLALLELAQQDHGALDCCVVVILSHGCQASHLQFPGAVYGTDGCPVSVEKIVNIFNGTSCPSLGGKPKLFFIQACGGEQKDHGFEVASTSPEDESPGSNPEPDATPFQEGLRTFDQLDAISSLPTPSDIFVSYSTFPGFVSWRDPKSGSWYVETLDDIFEQWAHSEDLQSLLLRVANAVSVKGIYKQMPGCFNFLRKKLFFKTS

SEQ ID NO: 1152 - protein, 607 aa, synthetic construct
  REGION 1..607: note = Description of Artificial Sequence: Synthetic payload sequence
MVGSLNCIVAVSQNMGIGKNGDLPWPPLRNEFRYFQRMTTTSSVEGKQNLVIMGKKTWFSIPEKNRPLKGRINLFLSRELKEPPQGAHFLSRSLDDALKLTEQPELANKVDMVWIVGGSSVIKEAMNHPGHLKLFVTRIMQDFESDTFFPEIDLEKYKLLPEYPGVLSDVQEEKGIKYKFEVYEKNDSGGGSDEADRRLLRRCRLRLVEELQVDQLWDALLSRELFRPHMIEDIQRAGSGSRRDQARQLIIDLETRGSQALPLFISCLEDTGQDMLASFLRTNRQAAKLSKPTLENLTPVVLRPEIRKPEVLRPETPRPVDIGSGGFGDVGALESLRGNADLAYILSMEPCGHCLIINNVNFCRESGLRTRTGSNIDCEKLRRRFSSLHFMVEVKGDLTAKKMVLALLELAQQDHGALDCCVVVILSHGCQASHLQFPGAVYGTDGCPVSVEKIVNIFNGTSCPSLGGKPKLFFIQACGGEQKDHGFEVASTSPEDESPGSNPEPDATPFQEGLRTFDQLDAISSLPTPSDIFVSYSTFPGFVSWRDPKSGSWYVETLDDIFEQWAHSEDLQSLLLRVANAVSVKGIYKQMPGCFNFLRKKLFFKTS

SEQ ID NO: 1153 - protein, 607 aa, synthetic construct
  REGION 1..607: note = Description of Artificial Sequence: Synthetic payload sequence
MVGSLNCIVAVSQNMGIGKNGDLPWPPLRNEFRYFQRMTTTSSVEGKQNLVIMGKKTWFSIPEKNRPLKGRINLVLSRELKEPPQGAHFLSRSADDALKLTEQPELANKVDMVWIVGGSSVYKEAMNHPGHLKLFVTRIMQDFESDAFFPEIDLEKYKLLPEYPGVLSDVQEEKGIKYKFEVYEKNDSGGGSDEADRRLLRRCRLRLVEELQVDQLWDALLSRELFRPHMIEDIQRAGSGSRRDQARQLIIDLETRGSQALPLFISCLEDTGQDMLASFLRTNRQAAKLSKPTLENLTPVVLRPEIRKPEVLRPETPRPVDIGSGGFGDVGALESLRGNADLAYILSMEPCGHCLIINNVNFCRESGLRTRTGSNIDCEKLRRRFSSLHFMVEVKGDLTAKKMVLALLELAQQDHGALDCCVVVILSHGCQASHLQFPGAVYGTDGCPVSVEKIVNIFNGTSCPSLGGKPKLFFIQACGGEQKDHGFEVASTSPEDESPGSNPEPDATPFQEGLRTFDQLDAISSLPTPSDIFVSYSTFPGFVSWRDPKSGSWYVETLDDIFEQWAHSEDLQSLLLRVANAVSVKGIYKQMPGCFNFLRKKLFFKTS

SEQ ID NO: 1154 - protein, 413 aa, synthetic construct
  REGION 1..413: note = Description of Artificial Sequence: Synthetic payload sequence
MLEGVQVETISPGDGRTFPKRGQTCVVHYTGMLEDGKKVDSSRDRNKPFKFMLGKQEVIRGWEEGVAQMSVGQRAKLTISPDYAYGATGHPGIIPPHATLVFDVELLKLESGGGSGVDGFGDVGALESLRGNADLAYILSMEPCGHCLIINNVNFCRESGLRTRTGSNIDCEKLRRRFSSLHFMVEVKGDLTAKKMVLALLELARQDHGALDCCVVVILSHGCQASHLQFPGAVYGTDGCPVSVEKIVNIFNGTSCPSLGGKPKLFFIQACGGEQKDHGFEVASTSPEDESPGSNPEPDATPFQEGLRTFDQLDAISSLPTPSDIFVSYSTFPGFVSWRDPKSGSWYVETLDDIFEQWAHSEDLQSLLLRVANAVSVKGIYKQMPGCFNFLRKKLFFKTSQLIGMLQGLMRDL

SEQ ID NO: 1155 - protein, 525 aa, synthetic construct
  REGION 1..525: note = Description of Artificial Sequence: Synthetic payload sequence
MDEADRRLLRRCRLRLVEELQVDQLWDALLSRELFRPHMIEDIQRAGSGSRRDQARQLIIDLETRGSQALPLFISCLEDTGQDMLASFLRTNRQAAKLSKPTLENLTPVVLRPEIRKPEVLRPETPRPVDIGSGGFGDVGALESLRGNADLAYILSMEPCGHCLIINNVNFCRESGLRTRTGSNIDCEKLRRRFSSLHFMVEVKGDLTAKKMVLALLELAQQDHGALDCCVVVILSHGCQASHLQFPGAVYGTDGCPVSVEKIVNIFNGTSCPSLGGKPKLFFIQACGGEQKDHGFEVASTSPEDESPGSNPEPDATPFQEGLRTFDQLDAISSLPTPSDIFVSYSTFPGFVSWRDPKSGSWYVETLDDIFEQWAHSEDLQSLLLRVANAVSVKGIYKQMPGCFNFLRKKLFFKTSSGGVQVETISPGDGRTFPKRGQTCVVHYTGMLGDGKKVDSSRDRNKPFKFMLGKQEVIRGWEEGVAQMSVGQGAKLTISPDYAYGATGHPGIIPPHATLVFDVELLELE

SEQ ID NO: 1156 - protein, 576 aa, synthetic construct
  REGION 1..576: note = Description of Artificial Sequence: Synthetic payload sequence
MDEADRRLLRRCRLRLVEELQVDQLWDALLSRELFRPHMIEDIQRAGSGSRRDQARQLIIDLETRGSQALPLFISCLEDTGQDMLASFLRTNRQAAKLSKPTLENLTPVVLRPEIRKPEVLRPETPRPVDIGSGGFGDVGALESLRGNADLAYILSMEPCGHCLIINNVNFCRESGLRTRTGSNIDCEKLRRRFSSLHFMVEVKGDLTAKKMVLALLELAQQDHGALDCCVVVILSHGCQASHLQFPGAVYGTDGCPVSVEKIVNIFNGTSCPSLGGKPKLFFIQACGGEQKDHGFEVASTSPEDESPGSNPEPDATPFQEGLRTFDQLDAISSLPTPSDIFVSYSTFPGFVSWRDPKSGSWYVETLDDIFEQWAHSEDLQSLLLRVANAVSVKGIYKQMPGCFNFLRKKLFFKTSSGISLIAALAVDYVIGMENAMPWNLPADLAWFKRNTLNKPVIMGRHTWESIGRPLPGRKNIILSSQPGTDDRVTWVKSVDEAIAACGDVPEIMVIGGGRVIEQFLPKAQKLYLTHIDAEVEGDTHFPDYEPDDWESVFSEFHDADAQNSHSYCFEILERR

SEQ ID NO: 1157 - protein, 576 aa, synthetic construct
  REGION 1..576: note = Description of Artificial Sequence: Synthetic payload sequence
MDEADRRLLRRCRLRLVEELQVDQLWDALLSRELFRPHMIEDIQRAGSGSRRDQARQLIIDLETRGSQALPLFISCLEDTGQDMLASFLRTNRQAAKLSKPTLENLTPVVLRPEIRKPEVLRPETPRPVDIGSGGFGDVGALESLRGNADLAYILSMEPCGHCLIINNVNFCRESGLRTRTGSNIDCEKLRRRFSSLHFMVEVKGDLTAKKMVLALLELAQQDHGALDCCVVVILSHGCQASHLQFPGAVYGTDGCPVSVEKIVNIFNGTSCPSLGGKPKLFFIQACGGEQKDHGFEVASTSPEDESPGSNPEPDATPFQEGLRTFDQLDAISSLPTPSDIFVSYSTFPGFVSWRDPKSGSWYVETLDDIFEQWAHSEDLQSLLLRVANAVSVKGIYKQMPGCFNFLRKKLFFKTSSGISLIAALAVDYVIGMENAMPWNLPADLAWFKRNTLNKPVIMGRHTWESIGRPLPGRKNIILSSQPGTDDRVTWVKSVDEAIAACGDVPEIMVIGGGRVYEQFLPKAQKLYLTHIDAEVEGDTHFPDYKPDDWESVFSEFHDADAQNSHSYCFEILERR

SEQ ID NO: 1158 - protein, 431 aa, synthetic construct; identical to SEQ ID NO: 745
  REGION 1..431: note = Description of Artificial Sequence: Synthetic payload sequence

SEQ ID NO: 1159 - protein, 396 aa, synthetic construct; identical to SEQ ID NO: 747
  REGION 1..396: note = Description of Artificial Sequence: Synthetic construct

SEQ ID NO: 1160 - protein, 543 aa, synthetic construct
  REGION 1..543: note = Description of Artificial Sequence: Synthetic construct
MGVQVETISPGDGRTFPKRGQTCVVHYTGMLEDGKKVDSSRDRNKPFKFMLGKQEVIRGWEEGVAQMSVGQRAKLTISPDYAYGATGHPGIIPPHATLVFDVELLKPESGGGSPNPRPGKPSAPSLALGPSPGASPSWRAAPKASDLLGARGPGGTFQGRDLRGGAHASSSSLNPMPPSQLQLPTLPLVMVAPSGARLGPLPHLQALLQDRPHFMHQLSTVDAHARTPVLQVHPLESPAMISLTPPTTATGVFSLKARPGLPPGINVASLEWVSREPALLCTFPNPSAPRKDSTLSAVPQSSYPLLANGVCKWPGCEKVFEEPEDFLKHCQADHLLDEKGRAQCLLQREMVQSLEQQLVLEKEKLSAMQAHLAGKMALTKASSVASSDKGSCCIVAAGSQGPVVPAWSGPREAPDSLFAVRRHLWGSHGNSTFPEFLHNMDYFKFHNMRPPFTYATLIRWAILEAPEKQRTLNEIYHWFTRMFAFFRNHPATWKNAIRHNLSLHKCFVRVESEKGAVWTVDELEFRKKRSQRPSRCSNPTPGP

SEQ ID NO: 1161 - protein, 594 aa, synthetic construct
  REGION 1..594: note = Description of Artificial Sequence: Synthetic construct
MISLIAALAVDYVIGMENAMPWNLPADLAWFKRNTLNKPVIMGRHTWESIGRPLPGRKNIILSSQPGTDDRVTWVKSVDEAIAACGDVPEIMVIGGGRVIEQFLPKAQKLYLTHIDAEVEGDTHFPDYEPDDWESVFSEFHDADAQNSHSYCFEILERRSGGGSPNPRPGKPSAPSLALGPSPGASPSWRAAPKASDLLGARGPGGTFQGRDLRGGAHASSSSLNPMPPSQLQLPTLPLVMVAPSGARLGPLPHLQALLQDRPHFMHQLSTVDAHARTPVLQVHPLESPAMISLTPPTTATGVFSLKARPGLPPGINVASLEWVSREPALLCTFPNPSAPRKDSTLSAVPQSSYPLLANGVCKWPGCEKVFEEPEDFLKHCQADHLLDEKGRAQCLLQREMVQSLEQQLVLEKEKLSAMQAHLAGKMALTKASSVASSDKGSCCIVAAGSQGPVVPAWSGPREAPDSLFAVRRHLWGSHGNSTFPEFLHNMDYFKFHNMRPPFTYATLIRWAILEAPEKQRTLNEIYHWFTRMFAFFRNHPATWKNAIRHNLSLHKCFVRVESEKGAVWTVDELEFRKKRSQRPSRCSNPTPGP

SEQ ID NO: 1162 - protein, 540 aa, synthetic construct
  REGION 1..540: note = Description of Artificial Sequence: Synthetic construct
MPNPRPGKPSAPSLALGPSPGASPSWRAAPKASDLLGARGPGGTFQGRDLRGGAHASSSSLNPMPPSQLQLPTLPLVMVAPSGARLGPLPHLQALLQDRPHFMHQLSTVDAHARTPVLQVHPLESPAMISLTPPTTATGVFSLKARPGLPPGINVASLEWVSREPALLCTFPNPSAPRKDSTLSAVPQSSYPLLANGVCKWPGCEKVFEEPEDFLKHCQADHLLDEKGRAQCLLQREMVQSLEQQLVLEKEKLSAMQAHLAGKMALTKASSVASSDKGSCCIVAAGSQGPVVPAWSGPREAPDSLFAVRRHLWGSHGNSTFPEFLHNMDYFKFHNMRPPFTYATLIRWAILEAPEKQRTLNEIYHWFTRMFAFFRNHPATWKNAIRHNLSLHKCFVRVESEKGAVWTVDELEFRKKRSQRPSRCSNPTPGPSGGVQVETISPGDGRTFPKRGQTCVVHYTGMLGDGKKVDSSRDRNKPFKFMLGKQEVIRGWEEGVAQMSVGQGAKLTISPDYAYGATGHPGIIPPHATLVFDVELLELE

SEQ ID NO: 1163 - protein, 591 aa, synthetic construct
  REGION 1..591: note = Description of Artificial Sequence: Synthetic construct
MPNPRPGKPSAPSLALGPSPGASPSWRAAPKASDLLGARGPGGTFQGRDLRGGAHASSSSLNPMPPSQLQLPTLPLVMVAPSGARLGPLPHLQALLQDRPHFMHQLSTVDAHARTPVLQVHPLESPAMISLTPPTTATGVFSLKARPGLPPGINVASLEWVSREPALLCTFPNPSAPRKDSTLSAVPQSSYPLLANGVCKWPGCEKVFEEPEDFLKHCQADHLLDEKGRAQCLLQREMVQSLEQQLVLEKEKLSAMQAHLAGKMALTKASSVASSDKGSCCIVAAGSQGPVVPAWSGPREAPDSLFAVRRHLWGSHGNSTFPEFLHNMDYFKFHNMRPPFTYATLIRWAILEAPEKQRTLNEIYHWFTRMFAFFRNHPATWKNAIRHNLSLHKCFVRVESEKGAVWTVDELEFRKKRSQRPSRCSNPTPGPSGISLIAALAVDYVIGMENAMPWNLPADLAWFKRNTLNKPVIMGRHTWESIGRPLPGRKNIILSSQPGTDDRVTWVKSVDEAIAACGDVPEIMVIGGGRVIEQFLPKAQKLYLTHIDAEVEGDTHFPDYEPDDWESVFSEFHDADAQNSHSYCFEILERR

SEQ ID NO: 1164 - protein, 505 aa, synthetic construct
  REGION 1..505: note = Description of Artificial Sequence: Synthetic construct
MGVQVETISPGDGRTFPKRGQTCVVHYTGMLEDGKKVDSSRDRNKPFKFMLGKQEVIRGWEEGVAQMSVGQRAKLTISPDYAYGATGHPGIIPPHATLVFDVELLKPESGPNPRPGKPSAPSLALGPSPGASPSWRAAPKASDLLGARGPGGTFQGRDLRGGAHASSSSLNPMPPSQLQLSTVDAHARTPVLQVHPLESPAMISLTPPTTATGVFSLKARPGLPPGINVASLEWVSREPALLCTFPNPSAPRKDSTLSAVPQSSYPLLANGVCKWPGCEKVFEEPEDFLKHCQADHLLDEKGRAQCLLQREMVQSLEQQLVLEKEKLSAMQAHLAGKMALTKASSVASSDKGSCCIVAAGSQGPVVPAWSGPREAPDSLFAVRRHLWGSHGNSTFPEFLHNMDYFKFHNMRPPFTYATLIRWAILEAPEKQRTLNEIYHWFTRMFAFFRNHPATWKNAIRHNLSLHKCFVRVESEKGAVWTVDELEFRKKRSQRPSRCSNPTPGP

SEQ ID NO: 1165 - protein, 556 aa, synthetic construct
  REGION 1..556: note = Description of Artificial Sequence: Synthetic construct
MISLIAALAVDYVIGMENAMPWNLPADLAWFKRNTLNKPVIMGRHTWESIGRPLPGRKNIILSSQPGTDDRVTWVKSVDEAIAACGDVPEIMVIGGGRVIEQFLPKAQKLYLTHIDAEVEGDTHFPDYEPDDWESVFSEFHDADAQNSHSYCFEILERRSGPNPRPGKPSAPSLALGPSPGASPSWRAAPKASDLLGARGPGGTFQGRDLRGGAHASSSSLNPMPPSQLQLSTVDAHARTPVLQVHPLESPAMISLTPPTTATGVFSLKARPGLPPGINVASLEWVSREPALLCTFPNPSAPRKDSTLSAVPQSSYPLLANGVCKWPGCEKVFEEPEDFLKHCQADHLLDEKGRAQCLLQREMVQSLEQQLVLEKEKLSAMQAHLAGKMALTKASSVASSDKGSCCIVAAGSQGPVVPAWSGPREAPDSLFAVRRHLWGSHGNSTFPEFLHNMDYFKFHNMRPPFTYATLIRWAILEAPEKQRTLNEIYHWFTRMFAFFRNHPATWKNAIRHNLSLHKCFVRVESEKGAVWTVDELEFRKKRSQRPSRCSNPTPGP

SEQ ID NO: 1166 - protein, 505 aa, synthetic construct
  REGION 1..505: note = Description of Artificial Sequence: Synthetic construct
MPNPRPGKPSAPSLALGPSPGASPSWRAAPKASDLLGARGPGGTFQGRDLRGGAHASSSSLNPMPPSQLQLSTVDAHARTPVLQVHPLESPAMISLTPPTTATGVFSLKARPGLPPGINVASLEWVSREPALLCTFPNPSAPRKDSTLSAVPQSSYPLLANGVCKWPGCEKVFEEPEDFLKHCQADHLLDEKGRAQCLLQREMVQSLEQQLVLEKEKLSAMQAHLAGKMALTKASSVASSDKGSCCIVAAGSQGPVVPAWSGPREAPDSLFAVRRHLWGSHGNSTFPEFLHNMDYFKFHNMRPPFTYATLIRWAILEAPEKQRTLNEIYHWFTRMFAFFRNHPATWKNAIRHNLSLHKCFVRVESEKGAVWTVDELEFRKKRSQRPSRCSNPTPGPSGGVQVETISPGDGRTFPKRGQTCVVHYTGMLGDGKKVDSSRDRNKPFKFMLGKQEVIRGWEEGVAQMSVGQGAKLTISPDYAYGATGHPGIIPPHATLVFDVELLELE

SEQ ID NO: 1167 - protein, 556 aa, synthetic construct
  REGION 1..556: note = Description of Artificial Sequence: Synthetic construct
MPNPRPGKPSAPSLALGPSPGASPSWRAAPKASDLLGARGPGGTFQGRDLRGGAHASSSSLNPMPPSQLQLSTVDAHARTPVLQVHPLESPAMISLTPPTTATGVFSLKARPGLPPGINVASLEWVSREPALLCTFPNPSAPRKDSTLSAVPQSSYPLLANGVCKWPGCEKVFEEPEDFLKHCQADHLLDEKGRAQCLLQREMVQSLEQQLVLEKEKLSAMQAHLAGKMALTKASSVASSDKGSCCIVAAGSQGPVVPAWSGPREAPDSLFAVRRHLWGSHGNSTFPEFLHNMDYFKFHNMRPPFTYATLIRWAILEAPEKQRTLNEIYHWFTRMFAFFRNHPATWKNAIRHNLSLHKCFVRVESEKGAVWTVDELEFRKKRSQRPSRCSNPTPGPSGISLIAALAVDYVIGMENAMPWNLPADLAWFKRNTLNKPVIMGRHTWESIGRPLPGRKNIILSSQPGTDDRVTWVKSVDEAIAACGDVPEIMVIGGGRVIEQFLPKAQKLYLTHIDAEVEGDTHFPDYEPDDWESVFSEFHDADAQNSHSYCFEILERR

SEQ ID NO: 1168 - protein, 490 aa, synthetic construct
  REGION 1..490: note = Description of Artificial Sequence: Synthetic construct
MALPVTALLLPLALLLHAARPDIVLTQSPASLAMSLGKRATISCRASESVSVIGAHLIHWYQQKPGQPPKLLIYLASNLETGVPARFSGSGSGTDFTLTIDPVEEDDVAIYSCLQSRIFPRTFGGGTKLEIKGSTSGSGKPGSGEGSTKGQIQLVQSGPELKKPGETVKISCKASGYTFTDYSINWVKRAPGKGLKWMGWINTETREPAYAYDFRGRFAFSLETSASTAYLQINNLKYEDTATYFCALDYSYAMDYWGQGTSVTVSSTTTPAPRPPTPAPTIASQPLSLRPEACRPAAGGAVHTRGLDFACDIYIWAPLAGTCGVLLLSLVITLYCKRGRKKLLYIFKQPFMRPVQTTQEEDGCSCRFPEEEEGGCELRVKFSRSADAPAYKQGQNQLYNELNLGRREEYDVLDKRRGRDPEMGGKPRRKNPQEGLYNELQKDKMAEAYSEIGMKGERRRGKGHDGLYQGLSTATKDTYDALHMQALPPR

SEQ ID NO: 1169 - protein, 599 aa, synthetic construct
  REGION 1..599: note = Description of Artificial Sequence: Synthetic construct
MALPVTALLLPLALLLHAARPDIVLTQSPASLAMSLGKRATISCRASESVSVIGAHLIHWYQQKPGQPPKLLIYLASNLETGVPARFSGSGSGTDFTLTIDPVEEDDVAIYSCLQSRIFPRTFGGGTKLEIKGSTSGSGKPGSGEGSTKGQIQLVQSGPELKKPGETVKISCKASGYTFTDYSINWVKRAPGKGLKWMGWINTETREPAYAYDFRGRFAFSLETSASTAYLQINNLKYEDTATYFCALDYSYAMDYWGQGTSVTVSSTTTPAPRPPTPAPTIASQPLSLRPEACRPAAGGAVHTRGLDFACDIYIWAPLAGTCGVLLLSLVITLYCKRGRKKLLYIFKQPFMRPVQTTQEEDGCSCRFPEEEEGGCELRVKFSRSADAPAYKQGQNQLYNELNLGRREEYDVLDKRRGRDPEMGGKPRRKNPQEGLYNELQKDKMAEAYSEIGMKGERRRGKGHDGLYQGLSTATKDTYDALHMQALPPRSGGVQVETISPGDGRTFPKRGQTCVVHYTGMLGDGKKVDSSRDRNKPFKFMLGKQEVIRGWEEGVAQMSVGQGAKLTISPDYAYGATGHPGIIPPHATLVFDVELLELE

SEQ ID NO: 1170 - protein, 650 aa, synthetic construct
  REGION 1..650: note = Description of Artificial Sequence: Synthetic construct
MALPVTALLLPLALLLHAARPDIVLTQSPASLAMSLGKRATISCRASESVSVIGAHLIHWYQQKPGQPPKLLIYLASNLETGVPARFSGSGSGTDFTLTIDPVEEDDVAIYSCLQSRIFPRTFGGGTKLEIKGSTSGSGKPGSGEGSTKGQIQLVQSGPELKKPGETVKISCKASGYTFTDYSINWVKRAPGKGLKWMGWINTETREPAYAYDFRGRFAFSLETSASTAYLQINNLKYEDTATYFCALDYSYAMDYWGQGTSVTVSSTTTPAPRPPTPAPTIASQPLSLRPEACRPAAGGAVHTRGLDFACDIYIWAPLAGTCGVLLLSLVITLYCKRGRKKLLYIFKQPFMRPVQTTQEEDGCSCRFPEEEEGGCELRVKFSRSADAPAYKQGQNQLYNELNLGRREEYDVLDKRRGRDPEMGGKPRRKNPQEGLYNELQKDKMAEAYSEIGMKGERRRGKGHDGLYQGLSTATKDTYDALHMQALPPRSGISLIAALAVDYVIGMENAMPWNLPADLAWFKRNTLNKPVIMGRHTWESIGRPLPGRKNIILSSQPGTDDRVTWVKSVDEAIAACGDVPEIMVIGGGRVIEQFLPKAQKLYLTHIDAEVEGDTHFPDYEPDDWESVFSEFHDADAQNSHSYCFEILERR

SEQ ID NO: 1171 - protein, 686 aa, synthetic construct
  REGION 1..686: note = Description of Artificial Sequence: Synthetic construct
MLLLVTSLLLCELPHPAFLLIPDIQMTQSPSSLSASVGDRVTITCRASQDVNTAVAWYQQKPGKAPKLLIYSASFLYSGVPSRFSGSRSGTDFTLTISSLQPEDFATYYCQQHYTTPPTFGQGTKVEIKGSTSGSGKPGSGEGSGEVQLVESGGGLVQPGGSLRLSCAASGFNIKDTYIHWVRQAPGKGLEWVARIYPTNGYTRYADSVKGRFTISADTSKNTAYLQMNSLRAEDTAVYYCSRWGGDGFYAMDVWGQGTLVTVSSASFETTTPAPRPPTPAPTIASQPLSLRPEACRPAAGGAVHTRGLDFACDGSIYIWAPLAGTCGVLLLSLVITLYCTSKRGRKKLLYIFKQPFMRPVQTTQEEDGCSCRFPEEEEGGCELHMRVKFSRSADAPAYKQGQNQLYNELNLGRREEYDVLDKRRGRDPEMGGKPRRKNPQEGLYNELQKDKMAEAYSEIGMKGERRRGKGHDGLYQGLSTATKDTYDALHMQALPPRGSVGSLNCIVAVSQNMGIGKNGDLPWPPLRNEFRYFQRMTTTSSVEGKQNLVIMGKKTWFSIPEKNRPLKGRINLVLSRELKEPPQGAHFLSRSLDDALKLTEQPELANKVDMVWIVGGSSVIKEAMNHPGHLKLFVTRIMQDFESDTFFPEIDLEKYKLLPEYPGVLSDVQEEKGIKYKFEVYEKND

SEQ ID NO: 1172 - protein, 766 aa, Homo sapiens
MKTPWKVLLGLLGAAALVTIITVPVVLLNKGTDDATADSRKTYTLTDYLKNTYRLKLYSLRWISDHEYLYKQENNILVFNAEYGNSSVFLENSTFDEFGHSINDYSISPDGQFILLEYNYVKQWRHSYTASYDIYDLNKRQLITEERIPNNTQWVTWSPVGHKLAYVWNNDIYVKIEPNLPSYRITWTGKEDIIYNGITDWVYEEEVFSAYSALWWSPNGTFLAYAQFNDTEVPLIEYSFYSDESLQYPKTVRVPYPKAGAVNPTVKFFVVNTDSLSSVTNATSIQITAPASMLIGDHYLCDVTWATQERISLQWLRRIQNYSVMDICDYDESSGRWNCLVARQHIEMSTTGWVGRFRPSEPHFTLDGNSFYKIISNEEGYRHICYFQIDKKDCTFITKGTWEVIGIEALTSDYLYYISNEYKGMPGGRNLYKIQLSDYTKVTCLSCELNPERCQYYSVSFSKEAKYYQLRCSGPGLPLYTLHSSVNDKGLRVLEDNSALDKMLQNVQMPSKKLDFIILNETKFWYQMILPPHFDKSKKYPLLLDVYAGPCSQKADTVFRLNWATYLASTENIIVASFDGRGSGYQGDKIMHAINRRLGTFEVEDQIEAARQFSKMGFVDNKRIAIWGWSYGGYVTSMVLGSGSGVFKCGIAVAPVSRWEYYDSVYTERYMGLPTPEDNLDHYRNSTVMSRAENFKQVEYLLIHGTADDNVHFQQSAQISKALVDVGVDFQAMWYTDEDHGIASSTAHQHIYTHMSHFIKQCFSLP

SEQ ID NO: 1173 - protein, 159 aa, synthetic construct
  REGION 1..159: note = Description of Artificial Sequence: Synthetic destabilizing domain (DD)
MISLIAALAVDYVIGMENAMPWNLPADLAWFKRNTLNKPVIMGRHTWESIGRPLPGRKNIILSSQPGTDDRVTWVKSVDEAIAACGDVPEIMVIGGGRVIEQFLPKAQKLYLTHIDAEVEGDTHFPDYEPDDWESVFSEFHDADAQNSHSYCFEILERR

SEQ ID NO: 1174 - protein, 158 aa, synthetic construct
  REGION 1..158: note = Description of Artificial Sequence: Synthetic destabilizing domain (DD)
ISLIAALAVDYVIGMENAMPWNLPADLAWFKRNTLNKPVIMGRHTWESIGRPLPGRKNIILSSQPGTDDRVTWVKSVDEAIAACGDVPEIMVIGGGRVIEQFLPKAQKLYLTHIDAEVEGDTHFPDYEPDDWESVFSEFHDADAQNSHSYCFEILERR

SEQ ID NO: 1175 - protein, 158 aa, synthetic construct
  REGION 1..158: note = Description of Artificial Sequence: Synthetic destabilizing domain (DD)
ISLIAALAVDHVIGMENAMPWNLPADLAWFKRNTLNKPVIMGRHTWESIGRPLPGRKNIILSSQPGTDDRVTWVKSVDEAIAACGDVPEIMVIGGGRVYEQFLPKAQKLYLTHIDAEVEGDTHFPDYKPDDWESVFSEFHDADAQNSHSYCFEILERR

SEQ ID NO: 1176 - protein, 107 aa, synthetic construct
  REGION 1..107: note = Description of Artificial Sequence: Synthetic destabilizing domain (DD)
GVQVETISPGDGRTFPKRGQTCVVHYTGMLEDGKKVDSSRDRNKPFKFMLGKQEVIRGWEEGVAQMSVGQRAKLTISPDYAYGATGHPGIIPPHATLVFDVELLKPE

SEQ ID NO: 1177 - protein, 107 aa, synthetic construct
  REGION 1..107: note = Description of Artificial Sequence: Synthetic destabilizing domain (DD)
GVQVETISPGDGRTFPKRGQTCVVHYTGMLGDGKKVDSSRDRNKPFKFMLGKQEVIRGWEEGVAQMSVGQGAKLTISPDYAYGATGHPGIIPPHATLVFDVELLELE

SEQ ID NO: 1178 - DNA, 561 bp, Homo sapiens
  source 1..561: mol_type = other DNA
atggttggttcgctaaactgcatcgtcgctgtgtcccagaacatgggcatcggcaagaacggggacctgccctggccaccgctcaggaatgaattcagatatttccagagaatgaccacaacctcttcagtagaaggtaaacagaatctggtgattatgggtaagaagacctggttctccattcctgagaagaatcgacctttaaagggtagaattaatttagttctcagcagagaactcaaggaacctccacaaggagctcattttctttccagaagtctagatgatgccttaaaacttactgaacaaccagaattagcaaataaagtagacatggtctggatagttggtggcagttctgtttataaggaagccatgaatcacccaggccatcttaaactatttgtgacaaggatcatgcaagactttgaaagtgacacgttttttccagaaattgatttggagaaatataaacttctgccagaatacccaggtgttctctctgatgtccaggaggagaaaggcattaagtacaaatttgaagtatatgagaagaatgat

SEQ ID NO: 1179 - protein, 159 aa, Escherichia coli [sequence omitted]

SEQ ID NO: 1180 - DNA, 477 bp, synthetic construct
  misc_feature 1..477: note = Description of Artificial Sequence: Synthetic destabilizing domain (DD)
  source 1..477: mol_type = other DNA
atgatctctctgattgcggcgctggcagttgaccgcgttattggcatggaaaacgcgatgccatggaacctcccggctgacctggcgtggttcaaacgtaacaccctgaacaaacctgtgatcatgggtcgtcacacctgggaatctattggccgtcctctcccgggtcgtaaaaacatcattctgtcttctcagccaggcaccgacgaccgtgttacctgggttaaaagcgttgacgaagcgattgctgcgtgcggtgatgttcctgaaattatggtgatcggcggtggccgtgtttacgaacagttcctgccgaaagcgcagaaactgtacctgacccacatcgacgcggaagttgaaggtgacacccacttcccggactacgaaccggatgattgggagagcgtattctccgaattccatgatgcggatgcgcaaaactctcattcttactgttttgaaatcctggaacgtcgt

SEQ ID NO: 1181 - protein, 239 aa, synthetic construct
  REGION 1..239: note = Description of Artificial Sequence: Synthetic polypeptide
MVSKGAELFTGIVPILIELNGDVNGHKFSVSGEGEGDATYGKLTLKFICTTGKLPVPWPTLVTTLSYGVQCFSRYPDHMKQHDFFKSAMPEGYIQERTIFFEDDGNYKSRAEVKFEGDTLVNRIELTGTDFKEDGNILGNKMEYNYNAHNVYIMTDKAKNGIKVNFKIRHNIEDGSVQLADHYQQNTPIGDGPVLLPDNHYLSTQSALSKDPNEKRDHMIYFGFVTAAAITHGMDELYK

SEQ ID NO: 1182 - DNA, 717 bp, synthetic construct
  misc_feature 1..717: note = Description of Artificial Sequence: Synthetic polynucleotide
  source 1..717: mol_type = other DNA
atggtttctaaaggtgcggagctgttcaccggtatcgttccgatcctgatcgaactgaacggtgacgtaaacggtcacaaattctctgtttctggtgaaggcgagggtgacgcgacgtacggtaagctgacgctgaagttcatctgcactaccggcaaactgccggttccgtggccgaccctggttaccaccctctcttacggtgttcagtgcttctctcgttacccggaccatatgaaacagcacgacttcttcaaatctgctatgccggaaggttacatccaggaacgtaccatctttttcgaagacgatggtaactataagtctcgtgcagaggttaaattcgagggcgataccctcgtgaaccgcatcgagctgaccggcactgacttcaaggaagacggtaacatcctgggtaacaaaatggaatacaactacaacgctcacaacgtttacatcatgaccgacaaagccaaaaacggtatcaaggttaacttcaaaatccgtcacaacatcgaggatggttctgttcagctggcggaccactaccagcaaaacacccctatcggcgacggtccggtgctgctgccggacaatcactatctgtccacccagtccgcgctgtctaaagaccctaacgaaaaacgtgaccacatgatctacttcggtttcgtgaccgcagcggcaattacccacggtatggacgaactctacaaa

SEQ ID NO: 1183 - protein, 6 aa, synthetic construct
  REGION 1..6: note = Description of Artificial Sequence: Synthetic linker
GGSGGG

SEQ ID NO: 1184 - DNA, 18 bp, synthetic construct
  misc_feature 1..18: note = Description of Artificial Sequence: Synthetic oligonucleotide
  source 1..18: mol_type = other DNA
ggtggctctggtggtggt

SEQ ID NO: 1185 - DNA, 18 bp, synthetic construct
  misc_feature 1..18: note = Description of Artificial Sequence: Synthetic oligonucleotide
  source 1..18: mol_type = other DNA
ggaggtagtggtggaggc

SEQ ID NO: 1186 - protein, 434 aa, synthetic construct
  REGION 1..434: note = Description of Artificial Sequence: Synthetic polypeptide
MVGSLNCIVAVSQNMGIGKNGDLPWPPLRNEFRYFQRMTTTSSVEGKQNLVIMGKKTWFSIPEKNRPLKGRINLVLSRELKEPPQGAHFLSRSLDDALKLTEQPELANKVDMVWIVGGSSVYKEAMNHPGHLKLFVTRIMQDFESDTFFPEIDLEKYKLLPEYPGVLSDVQEEKGIKYKFEVYEKNDTSGGSGGGMVSKGAELFTGIVPILIELNGDVNGHKFSVSGEGEGDATYGKLTLKFICTTGKLPVPWPTLVTTLSYGVQCFSRYPDHMKQHDFFKSAMPEGYIQERTIFFEDDGNYKSRAEVKFEGDTLVNRIELTGTDFKEDGNILGNKMEYNYNAHNVYIMTDKAKNGIKVNFKIRHNIEDGSVQLADHYQQNTPIGDGPVLLPDNHYLSTQSALSKDPNEKRDHMIYFGFVTAAAITHGMDELYK

SEQ ID NO: 1187 - protein, 433 aa, synthetic construct
  REGION 1..433: note = Description of Artificial Sequence: Synthetic polypeptide
MVSKGAELFTGIVPILIELNGDVNGHKFSVSGEGEGDATYGKLTLKFICTTGKLPVPWPTLVTTLSYGVQCFSRYPDHMKQHDFFKSAMPEGYIQERTIFFEDDGNYKSRAEVKFEGDTLVNRIELTGTDFKEDGNILGNKMEYNYNAHNVYIMTDKAKNGIKVNFKIRHNIEDGSVQLADHYQQNTPIGDGPVLLPDNHYLSTQSALSKDPNEKRDHMIYFGFVTAAAITHGMDELYKGGSGGGTSVGSLNCIVAVSQNMGIGKNGDLPWPPLRNEFRYFQRMTTTSSVEGKQNLVIMGKKTWFSIPEKNRPLKGRINLVLSRELKEPPQGAHFLSRSLDDALKLTEQPELANKVDMVWIVGGSSVYKEAMNHPGHLKLFVTRIMQDFESDTFFPEIDLEKYKLLPEYPGVLSDVQEEKGIKYKFEVYEKND

SEQ ID NO: 1188 - protein, 404 aa, synthetic construct
  REGION 1..404: note = Description of Artificial Sequence: Synthetic polypeptide
MISLIAALAVDRVIGMENAMPWNLPADLAWFKRNTLNKPVIMGRHTWESIGRPLPGRKNIILSSQPGTDDRVTWVKSVDEAIAACGDVPEIMVIGGGRVYEQFLPKAQKLYLTHIDAEVEGDTHFPDYEPDDWESVFSEFHDADAQNSHSYCFEILERRGGSGGGMVSKGAELFTGIVPILIELNGDVNGHKFSVSGEGEGDATYGKLTLKFICTTGKLPVPWPTLVTTLSYGVQCFSRYPDHMKQHDFFKSAMPEGYIQERTIFFEDDGNYKSRAEVKFEGDTLVNRIELTGTDFKEDGNILGNKMEYNYNAHNVYIMTDKAKNGIKVNFKIRHNIEDGSVQLADHYQQNTPIGDGPVLLPDNHYLSTQSALSKDPNEKRDHMIYFGFVTAAAITHGMDELYK

SEQ ID NO: 1189 - DNA, 406 bp, Homo sapiens
  source 1..406: mol_type = other DNA
gggtaagaagacctggttctccattcctgagaagaatcgacctttaaagggtagaattaatttagttctcagcagagaactcaaggaacctccacaaggagctcattttctttccagaagtctagatgatgccttaaaacttactgaacaaccagaattagcaaataaagtagacatggtctggatagttggtggcagttctgtttataaggaagccatgaatcacccaggccatcttaaactatttgtgacaaggatcatgcaagactttgaaagtgacacgttttttccagaaattgatttggagaaatataaacttctgccagaatacccaggtgttctctctgatgtccaggaggagaaaggcattaagtacaaatttgaagtatatgagaagaatgattaa

SEQ ID NO: 1190 - protein, 129 aa, Homo sapiens
MVGSLNCIVAVSQNMGIGKNGDLPWPPLRNEFRYFQRMTTTSSVEGKQNLVIMGKKTWFSIPEKNRPLKGRINLVLSRELKEPPQGAHFLSRSLDDALKLTEQPELANKVDMVWIVGGSSVYKIPRCSL

SEQ ID NO: 1191 - DNA, 389 bp, Homo sapiens
  source 1..389: mol_type = other DNA
atggttggttcgctaaactgcatcgtcgctgtgtcccagaacatgggcatcggcaagaacggggacctgccctggccaccgctcaggaatgaattcagatatttccagagaatgaccacaacctcttcagtagaaggtaaacagaatctggtgattatgggtaagaagacctggttctccattcctgagaagaatcgacctttaaagggtagaattaatttagttctcagcagagaactcaaggaacctccacaaggagctcattttctttccagaagtctagatgatgccttaaaacttactgaacaccagaattagcaaataaagtagacatggtctggatagttggtggcagttctgtttataagatacccaggtgttctctctga

SEQ ID NO: 1192 - protein, 97 aa, Homo sapiens [sequence omitted]

SEQ ID NO: 1193 - protein, 187 aa, Homo sapiens
MFLLLNCIVAVSQNMGIGKNGDLPRPPLRNEFRYFQRMTTTSSVEGKQNLVIMGRKTWFSIPEKNRPLKDRINLVLSRELKEPPQGAHFLARSLDDALKLTERPELANKVDMIWIVGGSSVYKEAMNHLGHLKLFVTRIMQDFESDTFFSEIDLEKYKLLPEYPGVLSDVQEGKHIKYKFEVCEKDD

SEQ ID NO: 1194 - DNA, 554 bp, Homo sapiens
  source 1..554: mol_type = other DNA
atgtttcttttgctaaactgcatcgtcgctgtgtcccaaaacatgggcatcggcaagaacggggacctgcccaggccgccgctcaggaatgaattcaggtatttccagagaatgaccacaacttcttcagtagagggtaaacagaatctggtgattatgggtaggaagacctggttctccattcctgagaagaatcgacctttaaaggatagaattaatttagttctcagcagagaactcaaggaacctccacaaggagctcattttcttgccagaagtttggatgatgccttaaaacttactgaacgaccagaattagcaaataaagtagacatgatttggatagttggtggcagttctgtttataaggaagccatgaatcacctaggccatcttaaactatttgtgacaaggatcatgcaggactttgaaagtgacacgtttttttcagaaattgacttggagaaatataaacttctgcctgaatacccaggtgttctctctgatgtccaggaggggaaacacatcaagtacaaatttgaagtatgtgagaa

SEQ ID NO: 1195 - DNA, 561 bp, synthetic construct; identical to SEQ ID NO: 83
  misc_feature 1..561: note = Description of Artificial Sequence: Synthetic destabilizing domain (DD)
  source 1..561: mol_type = other DNA

SEQ ID NO: 1196 - protein, 186 aa, synthetic construct
  REGION 1..186: note = Description of Artificial Sequence: Synthetic destabilizing domain (DD)
VGSLNCIVAVSQNMGIGKNGDLPWPPLRNEFRYFQRMTTTSSVEGKQNLVIMGKKTWFSIPEKNRPLKGRINLVLSRELKEPPQGAHFLSRSLDDALKLTEQPELANKVDMVWIVGGSSVIKEAMNHPGRLKLFVTRIMQDFGSDTFFPEIDLEKYKLLPEYPGVLSDVQEEKGIKYKFEVYEKND

SEQ ID NO: 1197 - protein, 187 aa, synthetic construct; identical to SEQ ID NO: 4
  REGION 1..187: note = Description of Artificial Sequence: Synthetic destabilizing domain (DD)

SEQ ID NO: 1198 - protein, 187 aa, synthetic construct; identical to SEQ ID NO: 3
  REGION 1..187: note = Description of Artificial Sequence: Synthetic destabilizing domain (DD)

SEQ ID NO: 1199 - protein, 187 aa, synthetic construct; identical to SEQ ID NO: 10
  REGION 1..187: note = Description of Artificial Sequence: Synthetic destabilizing domain (DD)

SEQ ID NO: 1200 - protein, 187 aa, synthetic construct; identical to SEQ ID NO: 6
  REGION 1..187: note = Description of Artificial Sequence: Synthetic destabilizing domain (DD)

SEQ ID NO: 1201 - protein, 187 aa, synthetic construct; identical to SEQ ID NO: 2
  REGION 1..187: note = Description of Artificial Sequence: Synthetic destabilizing domain (DD)

SEQ ID NO: 1202 - protein, 187 aa, synthetic construct; identical to SEQ ID NO: 11
  REGION 1..187: note = Description of Artificial Sequence: Synthetic destabilizing domain (DD)

SEQ ID NO: 1203 - protein, 187 aa, synthetic construct; identical to SEQ ID NO: 8
  REGION 1..187: note = Description of Artificial Sequence: Synthetic destabilizing domain (DD)

SEQ ID NO: 1204 - protein, 187 aa, synthetic construct; identical to SEQ ID NO: 7
  REGION 1..187: note = Description of Artificial Sequence: Synthetic destabilizing domain (DD)

SEQ ID NO: 1205 - protein, 187 aa, synthetic construct; identical to SEQ ID NO: 5
  REGION 1..187: note = Description of Artificial Sequence: Synthetic destabilizing domain (DD)

SEQ ID NO: 1206 - protein, 187 aa, synthetic construct; identical to SEQ ID NO: 9
  REGION 1..187: note = Description of Artificial Sequence: Synthetic destabilizing domain (DD)

SEQ ID NO: 1207 - protein, 187 aa, synthetic construct; identical to SEQ ID NO: 14
  REGION 1..187: note = Description of Artificial Sequence: Synthetic destabilizing domain (DD)

SEQ ID NO: 1208 - protein, 187 aa, synthetic construct; identical to SEQ ID NO: 12
  REGION 1..187: note = Description of Artificial Sequence: Synthetic destabilizing domain (DD)

SEQ ID NO: 1209 - protein, 187 aa, synthetic construct; identical to SEQ ID NO: 23
  REGION 1..187: note = Description of Artificial Sequence: Synthetic destabilizing domain (DD)

SEQ ID NO: 1210 - protein, 187 aa, synthetic construct; identical to SEQ ID NO: 21
  REGION 1..187: note = Description of Artificial Sequence: Synthetic destabilizing domain (DD)

SEQ ID NO: 1211 - protein, 187 aa, synthetic construct; identical to SEQ ID NO: 25
  REGION 1..187: note = Description of Artificial Sequence: Synthetic destabilizing domain (DD)

SEQ ID NO: 1212 - protein, 187 aa, synthetic construct
  REGION 1..187: note = Description of Artificial Sequence: Synthetic destabilizing domain (DD)
MVGSLNCIVAVSQNMGIGKNGDLPWPPLRNEFRYFQRMTTTSSVEGKQNLVIMGKKTWFSIPGKNRPLKGRINLVLSRELKEPPQGAHFLSRSLDDALKLTEQPELANKVDMVWIVGGSSVYKEAMNHPGHLKLFVTRIMQDFESDTFFPEIDLEKYKLLPEYPGVLSDVQEEKGFKYKFEVYEKND

SEQ ID NO: 1213 - protein, 187 aa, synthetic construct; identical to SEQ ID NO: 16
  REGION 1..187: note = Description of Artificial Sequence: Synthetic destabilizing domain (DD)

SEQ ID NO: 1214 - protein, 187 aa, synthetic construct; identical to SEQ ID NO: 19
  REGION 1..187: note = Description of Artificial Sequence: Synthetic destabilizing domain (DD)

SEQ ID NO: 1215 - protein, 187 aa, synthetic construct; identical to SEQ ID NO: 27
  REGION 1..187: note = Description of Artificial Sequence: Synthetic destabilizing domain (DD)

SEQ ID NO: 1216 - protein, 187 aa, synthetic construct; identical to SEQ ID NO: 20
  REGION 1..187: note = Description of Artificial Sequence: Synthetic destabilizing domain (DD)

SEQ ID NO: 1217 - protein, 187 aa, synthetic construct; identical to SEQ ID NO: 26
  REGION 1..187: note = Description of Artificial Sequence: Synthetic destabilizing domain (DD)

SEQ ID NO: 1218 - protein, 187 aa, synthetic construct; identical to SEQ ID NO: 28
  REGION 1..187: note = Description of Artificial Sequence: Synthetic destabilizing domain (DD)

SEQ ID NO: 1219 - protein, 187 aa, synthetic construct; identical to SEQ ID NO: 17
  REGION 1..187: note = Description of Artificial Sequence: Synthetic destabilizing domain (DD)

SEQ ID NO: 1220 - protein, 187 aa, synthetic construct; identical to SEQ ID NO: 24
  REGION 1..187: note = Description of Artificial Sequence: Synthetic destabilizing domain (DD)

SEQ ID NO: 1221 - protein, 187 aa, synthetic construct; identical to SEQ ID NO: 30
  REGION 1..187: note = Description of Artificial Sequence: Synthetic destabilizing domain (DD)

SEQ ID NO: 1222 - protein, 187 aa, synthetic construct; identical to SEQ ID NO: 31
  REGION 1..187: note = Description of Artificial Sequence: Synthetic destabilizing domain (DD)

SEQ ID NO: 1223 - protein, 187 aa, synthetic construct; identical to SEQ ID NO: 52
  REGION 1..187: note = Description of Artificial Sequence: Synthetic destabilizing domain (DD)

SEQ ID NO: 1224 - protein, 187 aa, synthetic construct; identical to SEQ ID NO: 45
  REGION 1..187: note = Description of Artificial Sequence: Synthetic destabilizing domain (DD)

SEQ ID NO: 1225 - protein, 187 aa, synthetic construct; identical to SEQ ID NO: 47
  REGION 1..187: note = Description of Artificial Sequence: Synthetic destabilizing domain (DD)

SEQ ID NO: 1226 - protein, 187 aa, synthetic construct; identical to SEQ ID NO: 46
  REGION 1..187: note = Description of Artificial Sequence: Synthetic destabilizing domain (DD)

SEQ ID NO: 1227 - protein, 187 aa, synthetic construct; identical to SEQ ID NO: 49
  REGION 1..187: note = Description of Artificial Sequence: Synthetic destabilizing domain (DD)

SEQ ID NO: 1228 - protein, 187 aa, synthetic construct
  REGION 1..187: note = Description of Artificial Sequence: Synthetic destabilizing domain (DD)
MVGSLNCIVAVSQNMGIGKNGDLPWPPLRNEFRYFQRMTTTSSVEGKQNLVIMRKKTWFSIPEKNRPLKGRINLVLSRELKEPPQGAHFLSRSLDDALKLTEQPELANKVDMVWIVGGSSVYKEAMNHPGHLKLFVTRIVQDFESDTFFPEIDLEKYKLLPEYPGVLCDVQEEKGIKYKFEVYEKND

SEQ ID NO: 1229 - protein, 187 aa, synthetic construct; identical to SEQ ID NO: 51
  REGION 1..187: note = Description of Artificial Sequence: Synthetic destabilizing domain (DD)

SEQ ID NO: 1230 - protein, 186 aa, synthetic construct; identical to SEQ ID NO: 57
  REGION 1..186: note = Description of Artificial Sequence: Synthetic destabilizing domain (DD)

SEQ ID NO: 1231 - protein, 187 aa, synthetic construct; identical to SEQ ID NO: 48
  REGION 1..187: note = Description of Artificial Sequence: Synthetic destabilizing domain (DD)

SEQ ID NO: 1232 - protein, 187 aa, synthetic construct; identical to SEQ ID NO: 44
  REGION 1..187: note = Description of Artificial Sequence: Synthetic destabilizing domain (DD)

SEQ ID NO: 1233 - protein, 187 aa, synthetic construct; identical to SEQ ID NO: 70
  REGION 1..187: note = Description of Artificial Sequence: Synthetic destabilizing domain (DD)

SEQ ID NO: 1234 - protein, 187 aa, synthetic construct; identical to SEQ ID NO: 59
  REGION 1..187: note = Description of Artificial Sequence: Synthetic destabilizing domain (DD)

SEQ ID NO: 1235 - protein, 187 aa, synthetic construct; identical to SEQ ID NO: 63
  REGION 1..187: note = Description of Artificial Sequence: Synthetic destabilizing domain (DD)

SEQ ID NO: 1236 - protein, 187 aa, synthetic construct; identical to SEQ ID NO: 67
  REGION 1..187: note = Description of Artificial Sequence: Synthetic destabilizing domain (DD)

SEQ ID NO: 1237 - protein, 187 aa, synthetic construct; identical to SEQ ID NO: 62
  REGION 1..187: note = Description of Artificial Sequence: Synthetic destabilizing domain (DD)

SEQ ID NO: 1238 - protein, 187 aa, synthetic construct; identical to SEQ ID NO: 65
  REGION 1..187: note = Description of Artificial Sequence: Synthetic destabilizing domain (DD)

SEQ ID NO: 1239 - protein, 187 aa, synthetic construct; identical to SEQ ID NO: 64
  REGION 1..187: note = Description of Artificial Sequence: Synthetic destabilizing domain (DD)

SEQ ID NO: 1240 - protein, 187 aa, synthetic construct; identical to SEQ ID NO: 66
  REGION 1..187: note = Description of Artificial Sequence: Synthetic destabilizing domain (DD)

SEQ ID NO: 1241 - protein, 187 aa, synthetic construct; identical to SEQ ID NO: 69
  REGION 1..187: note = Description of Artificial Sequence: Synthetic destabilizing domain (DD)

SEQ ID NO: 1242 - protein, 187 aa, synthetic construct; identical to SEQ ID NO: 68
  REGION 1..187: note = Description of Artificial Sequence: Synthetic destabilizing domain (DD)

SEQ ID NO: 1243 - protein, 186 aa, synthetic construct; identical to SEQ ID NO: 71
  REGION 1..186: note = Description of Artificial Sequence: Synthetic destabilizing domain (DD)

SEQ ID NO: 1244 - protein, 186 aa, synthetic construct; identical to SEQ ID NO: 33
  REGION 1..186: note = Description of Artificial Sequence: Synthetic destabilizing domain (DD)

SEQ ID NO: 1245 - protein, 186 aa, synthetic construct; identical to SEQ ID NO: 42
  REGION 1..186: note = Description of Artificial Sequence: Synthetic destabilizing domain (DD)

SEQ ID NO: 1246 - protein, 186 aa, synthetic construct; identical to SEQ ID NO: 37
  REGION 1..186: note = Description of Artificial Sequence: Synthetic destabilizing domain (DD)

SEQ ID NO: 1247 - protein, 186 aa, synthetic construct; identical to SEQ ID NO: 1196
  REGION 1..186: note = Description of Artificial Sequence: Synthetic destabilizing domain (DD)

SEQ ID NO: 1248 - protein, 186 aa, synthetic construct; identical to SEQ ID NO: 61
  REGION 1..186: note = Description of Artificial Sequence: Synthetic destabilizing domain (DD)

SEQ ID NO: 1249 - protein, 186 aa, synthetic construct; identical to SEQ ID NO: 55
  REGION 1..186: note = Description of Artificial Sequence: Synthetic destabilizing domain (DD)

SEQ ID NO: 1250 - protein, 186 aa, synthetic construct
  REGION 1..186: note = Description of Artificial Sequence: Synthetic destabilizing domain (DD)
VGSLNCIVAVSQNMGIGKNGDLPWPPLRNEFRYFQRMTTTSSVEGKQNLVIMGKKTWFSIPEKNRPLKGRINLVLSRELKEPPQGAHFLSRSLDDALKLTEQPELANKVDMVWIVGGSSVYKEAMNHPGHLKLFVTRIMQDFESDTFFPEIDLEKYKLLPGYPGVLSDVQEEKGFKYKFEVYEKND

SEQ ID NO: 1251 - protein, 186 aa, synthetic construct
  REGION 1..186: note = Description of Artificial Sequence: Synthetic destabilizing domain (DD)
VGSLNCIVAVSQNMGIGKNGDLPWPPLRNEFRYFQRMTTTSSVEGKQNLVIMGKKTWFSIPEKNRPLKGRINLVLSRELKEPPQGAHFLSRSLDDALKLTEQPELANKVDMVWIVGGSSVYKEAMNHPGHLKLFVTRIMQDFESDTFFPEIDLEKYKLLPEYPGVLSDVQEEKGIKYKFEVYEEND

SEQ ID NO: 1252 - protein, 186 aa, synthetic construct; identical to SEQ ID NO: 41
  REGION 1..186: note = Description of Artificial Sequence: Synthetic destabilizing domain (DD)

SEQ ID NO: 1253 - protein, 186 aa, synthetic construct; identical to SEQ ID NO: 56
  REGION 1..186: note = Description of Artificial Sequence: Synthetic destabilizing domain (DD)

SEQ ID NO: 1254 - protein, 186 aa, synthetic construct
  REGION 1..186: note = Description of Artificial Sequence: Synthetic destabilizing domain (DD)
VGSLNCIVAVSQNMGIGKNGDLPWPPLRNEFRYFQRMTTTSSVEGKQNLVIMGKKTWFSIPEKNRPLKGRINLVLSRELKEPPQGAHFLSRSLDDALKLTEQPELANKVDMVWIVGGSSVYKEAMYHPGHLKLFVTRIMQDFESDTFFPEIDLEKYKLLPEYPGVLSDVQEEKGIKYKFEVYEKND

SEQ ID NO: 1255 - protein, 186 aa, synthetic construct
  REGION 1..186: note = Description of Artificial Sequence: Synthetic destabilizing domain (DD)
VGSLNCIVAVSQNMGIGKNGDLPWPPLRNEFRYFQRMTTTSSVEGKQNLVIMGKKTWFSIPEKNRPLKGRINLVLSRELKEPPQGAHFLSRSLDDALKLTEQPELANKVDMVWIVGGSSVYKEAMNHPGRLKLFVTRIMQDFGSDTFFPEIDLEKYKLLPEYPGVLSDVQEEKGIKYKFEVYEKND

SEQ ID NO: 1256 - protein, 186 aa, synthetic construct
  REGION 1..186: note = Description of Artificial Sequence: Synthetic destabilizing domain (DD)
VGSLNCIVAVSQNMGVGKNGDLPWPPLRNEFRYFQRMTTTSSVEGKQNLVIMGKKTWFSIPEKNRPLKGRINLVLSRELKEPPQGAHFLSRSLDDALKLTEQPELANKVDMVWIVGGSSVYKEAMNHPGHLKLFVTRIMQDFESDTFFPEIDLEKYKLLPEYPGVLSDVQEEKGIKYKFEVYEKND

SEQ ID NO: 1257 - protein, 186 aa, synthetic construct; identical to SEQ ID NO: 13
  REGION 1..186: note = Description of Artificial Sequence: Synthetic destabilizing domain (DD)

SEQ ID NO: 1258 - protein, 187 aa, synthetic construct; identical to SEQ ID NO: 15
  REGION 1..187: note = Description of Artificial Sequence: Synthetic destabilizing domain (DD)

SEQ ID NO: 1259 - protein, 186 aa, synthetic construct; identical to SEQ ID NO: 38
  REGION 1..186: note = Description of Artificial Sequence: Synthetic destabilizing domain (DD)

SEQ ID NO: 1260 - protein, 4 aa, Homo sapiens
PEKN

SEQ ID NO: 1261 - DNA, 1650 bp, synthetic construct
  misc_feature 1..1650: note = Description of Artificial Sequence: Synthetic payload sequence
  source 1..1650: mol_type = other DNA
atggaagatgccaaaaacattaagaagggcccagcgccattctacccactcgaagacgggaccgccggcgagcagctgcacaaagccatgaagcgctacgccctggtgcccggcaccatcgcctttaccgacgcacatatcgaggtggacattacctacgccgagtacttcgagatgagcgttcggctggcagaagctatgaagcgctatgggctgaatacaaaccatcggatcgtggtgtgcagcgagaatagcttgcagttcttcatgcccgtgttgggtgccctgttcatcggtgtggctgtggccccagctaacgacatctacaacgagcgcgagctgctgaacagcatgggcatcagccagcccaccgtcgtattcgtgagcaagaaagggctgcaaaagatcctcaacgtgcaaaagaagctaccgatcatacaaaagatcatcatcatggatagcaagaccgactaccagggcttccaaagcatgtacaccttcgtgacttcccatttgccacccggcttcaacgagtacgacttcgtgcccgagagcttcgaccgggacaaaaccatcgccctgatcatgaacagtagtggcagtaccggattgcccaagggcgtagccctaccgcaccgcaccgcttgtgtccgattcagtcatgcccgcgaccccatcttcggcaaccagatcatccccgacaccgctatcctcagcgtggtgccatttcaccacggcttcggcatgttcaccacgctgggctacttgatctgcggctttcgggtcgtgctcatgtaccgcttcgaggaggagctattcttgcgcagcttgcaagactataagattcaatctgccctgctggtgcccacactatttagcttcttcgctaagagcactctcatcgacaagtacgacctaagcaacttgcacgagatcgccagcggcggggcgccgctcagcaaggaggtaggtgaggccgtggccaaacgcttccacctaccaggcatccgccagggctacggcctgacagaaacaaccagcgccattctgatcacccccgaaggggacgacaagcctggcgcagtaggcaaggtggtgcccttcttcgaggctaaggtggtggacttggacaccggtaagacactgggtgtgaaccagcgcggcgagctgtgcgtccgtggccccatgatcatgagcggctacgttaacaaccccgaggctacaaacgctctcatcgacaaggacggctggctgcacagcggcgacatcgcctactgggacgaggacgagcacttcttcatcgtggaccggctgaagagcctgatcaaatacaagggctaccaggtagccccagccgaactggagagcatcctgctgcaacaccccaacatcttcgacgccggggtcgccggcctgcccgacgacgatgccggcgagctgcccgccgcagtcgtcgtgctggaacacggtaaaaccatgaccgagaaggagatcgtggactatgtggccagccaggttacaaccgccaagaagctgcgcggtggtgttgtgttcgtggacgaggtgcctaaaggactgaccggcaagttggacgcccgcaagatccgcgagattctcattaaggccaagaagggcggcaagatcgccgtg

SEQ ID NO: 1262 - protein, 9 aa, synthetic construct
  REGION 1..9: note = Description of Artificial Sequence: Synthetic linker
GGSGGGSGG

SEQ ID NO: 1263 - protein, 434 aa, synthetic construct
  REGION 1..434: note = Description of Artificial Sequence: Synthetic polypeptide
MVGSLNCIVAVSQNMGIGKNGDLPWPPLRNEFRYFQRMTTTSSVEGKQNLVIMGKKTWFSIPEKNRPLKGRINLVLSRELKEPPQGAHFLSRSLDDALKLTEQPELANKVDMVWIVGGSSVIKEAMNHPGHLKLFVTRIMQDFESDTFFPEIDLEKYKLLPEYPGVLSDVQEEKGIKYKFEVYEKNDTSGGSGGGMVSKGAELFTGIVPILIELNGDVNGHKFSVSGEGEGDATYGKLTLKFICTTGKLPVPWPTLVTTLSYGVQCFSRYPDHMKQHDFFKSAMPEGYIQERTIFFEDDGNYKSRAEVKFEGDTLVNRIELTGTDFKEDGNILGNKMEYNYNAHNVYIMTDKAKNGIKVNFKIRHNIEDGSVQLADHYQQNTPIGDGPVLLPDNHYLSTQSALSKDPNEKRDHMIYFGFVTAAAITHGMDELYK

SEQ ID NO: 1264 - protein, 434 aa, synthetic construct
  REGION 1..434: note = Description of Artificial Sequence: Synthetic polypeptide
MVGSLNCIVAVSQNMGIGKNGDLPWPPLRNEFRYFQRMTTTSSVEGKQNLVITGKKTWFSIPEKNRPLKGRINLVLSRELKEPPQGAHFLSRSLDDALKLTEQPELANKVDMVWIVGGSSVYKEAMNHPGHLKLFVTIIMQDFESDTFFPEIDLEKYKLLPEYPGVLSDVQEEKGIKYKFEVYEKNDTSGGSGGGMVSKGAELFTGIVPILIELNGDVNGHKFSVSGEGEGDATYGKLTLKFICTTGKLPVPWPTLVTTLSYGVQCFSRYPDHMKQHDFFKSAMPEGYIQERTIFFEDDGNYKSRAEVKFEGDTLVNRIELTGTDFKEDGNILGNKMEYNYNAHNVYIMTDKAKNGIKVNFKIRHNIEDGSVQLADHYQQNTPIGDGPVLLPDNHYLSTQSALSKDPNEKRDHMIYFGFVTAAAITHGMDELYK

SEQ ID NO: 1265 - protein, 434 aa, synthetic construct
  REGION 1..434: note = Description of Artificial Sequence: Synthetic polypeptide
MVGSLNCIVAVSQNMGIGKNGDLPWPPLRNEFRYFQRMTTTSSVEGKQNLVIMGKKTWFSIPEKNRPLKGRINLFLSRELKEPPQGAHFLSRSLDDALKLTEQPELANKVDMVWIVGGSSVIKEAMNHPGHLKLFVTRIMQDFESDTFFPEIDLEKYKLLPEYPGVLSDVQEEKGIKYKFEVYEKNDTSGGSGGGMVSKGAELFTGIVPILIELNGDVNGHKFSVSGEGEGDATYGKLTLKFICTTGKLPVPWPTLVTTLSYGVQCFSRYPDHMKQHDFFKSAMPEGYIQERTIFFEDDGNYKSRAEVKFEGDTLVNRIELTGTDFKEDGNILGNKMEYNYNAHNVYIMTDKAKNGIKVNFKIRHNIEDGSVQLADHYQQNTPIGDGPVLLPDNHYLSTQSALSKDPNEKRDHMIYFGFVTAAAITHGMDELYK

SEQ ID NO: 1266 - protein, 434 aa, synthetic construct
  REGION 1..434: note = Description of Artificial Sequence: Synthetic polypeptide
MVGSLNCIVAVSQNMGIGKNGDLPWPPLRNEFRYFQRMTTTSSVEGKQNLVIMGKKTWFSIPEKNRPLKGRINLVLSRELKEPPQGAHFLSRSLDDALKLTEQPELANKVDMVWIVGGSSVIKEFMNHPGHLKLFVTRIMQDFESDTFFPEIDLEKYKLLPEYPGVLSDVQEEKGIKYKFEVYEKNDTSGGSGGGMVSKGAELFTGIVPILIELNGDVNGHKFSVSGEGEGDATYGKLTLKFICTTGKLPVPWPTLVTTLSYGVQCFSRYPDHMKQHDFFKSAMPEGYIQERTIFFEDDGNYKSRAEVKFEGDTLVNRIELTGTDFKEDGNILGNKMEYNYNAHNVYIMTDKAKNGIKVNFKIRHNIEDGSVQLADHYQQNTPIGDGPVLLPDNHYLSTQSALSKDPNEKRDHMIYFGFVTAAAITHGMDELYK

SEQ ID NO: 1267 - protein, 434 aa, synthetic construct
  REGION 1..434: note = Description of Artificial Sequence: Synthetic polypeptide
MVGSLNCIVAVSQNMGIGKNGDLPWPPLRNEFRYFQRMTTTSSVEGKQNLVIMGKKTWFSIPEKNRPLKGRINNVLSRELKEPPQGAHFLSRSLDDALKLTEQPELANKVDMVWIVGGSSVIKEAMNHPGHLKLFVTRIMQDFESDTFFPEIDLEKYKLLPEYPGVLSDVQEEKGIKYKFEVYEKNDTSGGSGGGMVSKGAELFTGIVPILIELNGDVNGHKFSVSGEGEGDATYGKLTLKFICTTGKLPVPWPTLVTTLSYGVQCFSRYPDHMKQHDFFKSAMPEGYIQERTIFFEDDGNYKSRAEVKFEGDTLVNRIELTGTDFKEDGNILGNKMEYNYNAHNVYIMTDKAKNGIKVNFKIRHNIEDGSVQLADHYQQNTPIGDGPVLLPDNHYLSTQSALSKDPNEKRDHMIYFGFVTAAAITHGMDELYK

SEQ ID NO: 1268 - protein, 434 aa, synthetic construct
  REGION 1..434: note = Description of Artificial Sequence: Synthetic polypeptide
MVGSLNCIVAVSQNMGIGKNGDLPWPPLRNEFRYFQRMTTTSSVEGKQNLVIMGKKTWFSIPEKNRPLKGRINLVLSRELKEPPQGAHFLSRSADDALKLTEQPELANKVDMVWIVGGSSVYKEAMNHPGHLKLFVTRIMQDFESDAFFPEIDLEKYKLLPEYPGVLSDVQEEKGIKYKFEVYEKNDTSGGSGGGMVSKGAELFTGIVPILIELNGDVNGHKFSVSGEGEGDATYGKLTLKFICTTGKLPVPWPTLVTTLSYGVQCFSRYPDHMKQHDFFKSAMPEGYIQERTIFFEDDGNYKSRAEVKFEGDTLVNRIELTGTDFKEDGNILGNKMEYNYNAHNVYIMTDKAKNGIKVNFKIRHNIEDGSVQLADHYQQNTPIGDGPVLLPDNHYLSTQSALSKDPNEKRDHMIYFGFVTAAAITHGMDELYK

SEQ ID NO: 1269 - protein, 434 aa, synthetic construct
  REGION 1..434: note = Description of Artificial Sequence: Synthetic polypeptide
MVGSLNCIVAVSQNMGIGKNTDLPWPPLRNEFRYFQRMTTTSSVEGKQNLVIMGKKTWFSIPEKNRPLKGRINLVLSRELKEPPQGAHFLSRSLDDALKLTEQPELANKVDMVWIVGGSSVIKEAMNHPGHLKLFVTRIMQDFESDTFFPEIDLEKYKLLPEYPGVLSDVQEEKGIKYKFEVYEKNDTSGGSGGGMVSKGAELFTGIVPILIELNGDVNGHKFSVSGEGEGDATYGKLTLKFICTTGKLPVPWPTLVTTLSYGVQCFSRYPDHMKQHDFFKSAMPEGYIQERTIFFEDDGNYKSRAEVKFEGDTLVNRIELTGTDFKEDGNILGNKMEYNYNAHNVYIMTDKAKNGIKVNFKIRHNIEDGSVQLADHYQQNTPIGDGPVLLPDNHYLSTQSALSKDPNEKRDHMIYFGFVTAAAITHGMDELYK

SEQ ID NO: 1270 - protein, 434 aa, synthetic construct
  REGION 1..434: note = Description of Artificial Sequence: Synthetic polypeptide
MVGSLNCIVAVSQNMGIGKNGDLPWPPLRNEFRYFKRMTTTSSVEGKQNLVIMGKKTWFSIPEKNRPLKGRINLVLSRELKEPPQGAHFLSRSLDDALKLTEQPELANKVDMVWIVGGSSVIKEAMNHPGHLKLFVTRIMQDFESDTFFPEIDLEKYKLLPEYPGVLSDVQEEKGIKYKFEVYEKNDTSGGSGGGMVSKGAELFTGIVPILIELNGDVNGHKFSVSGEGEGDATYGKLTLKFICTTGKLPVPWPTLVTTLSYGVQCFSRYPDHMKQHDFFKSAMPEGYIQERTIFFEDDGNYKSRAEVKFEGDTLVNRIELTGTDFKEDGNILGNKMEYNYNAHNVYIMTDKAKNGIKVNFKIRHNIEDGSVQLADHYQQNTPIGDGPVLLPDNHYLSTQSALSKDPNEKRDHMIYFGFVTAAAITHGMDELYK

SEQ ID NO: 1271 - protein, 434 aa, synthetic construct
  REGION 1..434: note = Description of Artificial Sequence: Synthetic polypeptide
MVGSLNCIVAVSQNMGIGKNGDLPWPPLRNEFRYFKRMTTTSSVEGKQNLVIMGKKTWFSIPEKFRPLKGRINLVLSRELKEPPQGAHFLSRSLDDALKLTEQPELANKVDMVWIVGGSSVIKEAMNHPGHLKLFVTRIMQDFESDTFFPEIDLEKYKLLPEYPGVLSDVQEEKGIKYKFEVYEKNDTSGGSGGGMVSKGAELFTGIVPILIELNGDVNGHKFSVSGEGEGDATYGKLTLKFICTTGKLPVPWPTLVTTLSYGVQCFSRYPDHMKQHDFFKSAMPEGYIQERTIFFEDDGNYKSRAEVKFEGDTLVNRIELTGTDFKEDGNILGNKMEYNYNAHNVYIMTDKAKNGIKVNFKIRHNIEDGSVQLADHYQQNTPIGDGPVLLPDNHYLSTQSALSKDPNEKRDHMIYFGFVTAAAITHGMDELYK

SEQ ID NO: 1272 - protein, 434 aa, synthetic construct
  REGION 1..434: note = Description of Artificial Sequence: Synthetic polypeptide
MVGSLNCIVAVSQNMGIGKNGDLPWPPLRNEFRYFQRMTTTSSVEGKQNLVIMGKKTWFSIPEKNRPLKGRINLVLSRELKEPPQGAHFLSRSLDDALKLTEQPELANKVDMVWIVGGSSAIKEAMNHPGHLKLFVTRIMQDFESDTFFPEIDLEKYKLLPEYPGVLSDVQEEKGIKYKFEVYEKNDTSGGSGGGMVSKGAELFTGIVPILIELNGDVNGHKFSVSGEGEGDATYGKLTLKFICTTGKLPVPWPTLVTTLSYGVQCFSRYPDHMKQHDFFKSAMPEGYIQERTIFFEDDGNYKSRAEVKFEGDTLVNRIELTGTDFKEDGNILGNKMEYNYNAHNVYIMTDKAKNGIKVNFKIRHNIEDGSVQLADHYQQNTPIGDGPVLLPDNHYLSTQSALSKDPNEKRDHMIYFGFVTAAAITHGMDELYK

SEQ ID NO: 1273 - protein, 433 aa, synthetic construct
  REGION 1..433: note = Description of Artificial Sequence: Synthetic polypeptide
MVSKGAELFTGIVPILIELNGDVNGHKFSVSGEGEGDATYGKLTLKFICTTGKLPVPWPTLVTTLSYGVQCFSRYPDHMKQHDFFKSAMPEGYIQERTIFFEDDGNYKSRAEVKFEGDTLVNRIELTGTDFKEDGNILGNKMEYNYNAHNVYIMTDKAKNGIKVNFKIRHNIEDGSVQLADHYQQNTPIGDGPVLLPDNHYLSTQSALSKDPNEKRDHMIYFGFVTAAAITHGMDELYKGGSGGGTSVGSLNCIVAVSQNMGIGKNGDLPWPPLRNEFRYFQRMTTTSSVEGKQNLVIMGKKTWFSIPEKNRPLKGRINLVLSRELKEPPQGAHFLSRSLDDALKLTEQPELANKVDMVWIVGGSSVIKEAMNHPGHLKLFVTRIMQDFESDTFFPEIDLEKYKLLPEYPGVLSDVQEEKGIKYKFEVYEKND

SEQ ID NO: 1274 - protein, 433 aa, synthetic construct
  REGION 1..433: note = Description of Artificial Sequence: Synthetic polypeptide
MVSKGAELFTGIVPILIELNGDVNGHKFSVSGEGEGDATYGKLTLKFICTTGKLPVPWPTLVTTLSYGVQCFSRYPDHMKQHDFFKSAMPEGYIQERTIFFEDDGNYKSRAEVKFEGDTLVNRIELTGTDFKEDGNILGNKMEYNYNAHNVYIMTDKAKNGIKVNFKIRHNIEDGSVQLADHYQQNTPIGDGPVLLPDNHYLSTQSALSKDPNEKRDHMIYFGFVTAAAITHGMDELYKGGSGGGTSVGSLNCIVAVSQNMGIGKNGDLPWPPLRNEFRYFQRMTTTSSVEGKQNLVITGKKTWFSIPEKNRPLKGRINLVLSRELKEPPQGAHFLSRSLDDALKLTEQPELANKVDMVWIVGGSSVYKEAMNHPGHLKLFVTIIMQDFESDTFFPEIDLEKYKLLPEYPGVLSDVQEEKGIKYKFEVYEKND

SEQ ID NO: 1275 - protein, 433 aa, synthetic construct
  REGION 1..433: note = Description of Artificial Sequence: Synthetic polypeptide
MVSKGAELFTGIVPILIELNGDVNGHKFSVSGEGEGDATYGKLTLKFICTTGKLPVPWPTLVTTLSYGVQCFSRYPDHMKQHDFFKSAMPEGYIQERTIFFEDDGNYKSRAEVKFEGDTLVNRIELTGTDFKEDGNILGNKMEYNYNAHNVYIMTDKAKNGIKVNFKIRHNIEDGSVQLADHYQQNTPIGDGPVLLPDNHYLSTQSALSKDPNEKRDHMIYFGFVTAAAITHGMDELYKGGSGGGTSVGSLNCIVAVSQNMGIGKNGDLPWPPLRNEFRYFQRMTTTSSVEGKQNLVIMGKKTWFSIPEKNRPLKGRINLFLSRELKEPPQGAHFLSRSLDDALKLTEQPELANKVDMVWIVGGSSVIKEAMNHPGHLKLFVTRIMQDFESDTFFPEIDLEKYKLLPEYPGVLSDVQEEKGIKYKFEVYEKND

SEQ ID NO: 1276 - protein, 433 aa, synthetic construct
  REGION 1..433: note = Description of Artificial Sequence: Synthetic polypeptide
MVSKGAELFTGIVPILIELNGDVNGHKFSVSGEGEGDATYGKLTLKFICTTGKLPVPWPTLVTTLSYGVQCFSRYPDHMKQHDFFKSAMPEGYIQERTIFFEDDGNYKSRAEVKFEGDTLVNRIELTGTDFKEDGNILGNKMEYNYNAHNVYIMTDKAKNGIKVNFKIRHNIEDGSVQLADHYQQNTPIGDGPVLLPDNHYLSTQSALSKDPNEKRDHMIYFGFVTAAAITHGMDELYKGGSGGGTSVGSLNCIVAVSQNMGIGKNGDLPWPPLRNEFRYFQRMTTTSSVEGKQNLVIMGKKTWFSIPEKNRPLKGRINLVLSRELKEPPQGAHFLSRSLDDALKLTEQPELANKVDMVWIVGGSSVIKEFMNHPGHLKLFVTRIMQDFESDTFFPEIDLEKYKLLPEYPGVLSDVQEEKGIKYKFEVYEKND

SEQ ID NO: 1277 - protein, 433 aa, synthetic construct
  REGION 1..433: note = Description of Artificial Sequence: Synthetic polypeptide
MVSKGAELFTGIVPILIELNGDVNGHKFSVSGEGEGDATYGKLTLKFICTTGKLPVPWPTLVTTLSYGVQCFSRYPDHMKQHDFFKSAMPEGYIQERTIFFEDDGNYKSRAEVKFEGDTLVNRIELTGTDFKEDGNILGNKMEYNYNAHNVYIMTDKAKNGIKVNFKIRHNIEDGSVQLADHYQQNTPIGDGPVLLPDNHYLSTQSALSKDPNEKRDHMIYFGFVTAAAITHGMDELYKGGSGGGTSVGSLNCIVAVSQNMGIGKNGDLPWPPLRNEFRYFQRMTTTSSVEGKQNLVIMGKKTWFSIPEKNRPLKGRINNVLSRELKEPPQGAHFLSRSLDDALKLTEQPELANKVDMVWIVGGSSVIKEAMNHPGHLKLFVTRIMQDFESDTFFPEIDLEKYKLLPEYPGVLSDVQEEKGIKYKFEVYEKND

SEQ ID NO: 1278 - protein, 433 aa, synthetic construct
  REGION 1..433: note = Description of Artificial Sequence: Synthetic polypeptide
MVSKGAELFTGIVPILIELNGDVNGHKFSVSGEGEGDATYGKLTLKFICTTGKLPVPWPTLVTTLSYGVQCFSRYPDHMKQHDFFKSAMPEGYIQERTIFFEDDGNYKSRAEVKFEGDTLVNRIELTGTDFKEDGNILGNKMEYNYNAHNVYIMTDKAKNGIKVNFKIRHNIEDGSVQLADHYQQNTPIGDGPVLLPDNHYLSTQSALSKDPNEKRDHMIYFGFVTAAAITHGMDELYKGGSGGGTSVGSLNCIVAVSQNMGIGKNGDLPWPPLRNEFRYFQRMTTTSSVEGKQNLVIMGKKTWFSIPEKNRPLKGRINLVLSRELKEPPQGAHFLSRSADDALKLTEQPELANKVDMVWIVGGSSVYKEAMNHPGHLKLFVTRIMQDFESDAFFPEIDLEKYKLLPEYPGVLSDVQEEKGIKYKFEVYEKND

SEQ ID NO: 1279 - protein, 433 aa, synthetic construct
  REGION 1..433: note = Description of Artificial Sequence: Synthetic polypeptide
MVSKGAELFTGIVPILIELNGDVNGHKFSVSGEGEGDATYGKLTLKFICTTGKLPVPWPTLVTTLSYGVQCFSRYPDHMKQHDFFKSAMPEGYIQERTIFFEDDGNYKSRAEVKFEGDTLVNRIELTGTDFKEDGNILGNKMEYNYNAHNVYIMTDKAKNGIKVNFKIRHNIEDGSVQLADHYQQNTPIGDGPVLLPDNHYLSTQSALSKDPNEKRDHMIYFGFVTAAAITHGMDELYKGGSGGGTSVGSLNCIVAVSQNMGIGKNTDLPWPPLRNEFRYFQRMTTTSSVEGKQNLVIMGKKTWFSIPEKNRPLKGRINLVLSRELKEPPQGAHFLSRSLDDALKLTEQPELANKVDMVWIVGGSSVIKEAMNHPGHLKLFVTRIMQDFESDTFFPEIDLEKYKLLPEYPGVLSDVQEEKGIKYKFEVYEKND

SEQ ID NO: 1280 - protein, 433 aa, synthetic construct
  REGION 1..433: note = Description of Artificial Sequence: Synthetic polypeptide
MVSKGAELFTGIVPILIELNGDVNGHKFSVSGEGEGDATYGKLTLKFICTTGKLPVPWPTLVTTLSYGVQCFSRYPDHMKQHDFFKSAMPEGYIQERTIFFEDDGNYKSRAEVKFEGDTLVNRIELTGTDFKEDGNILGNKMEYNYNAHNVYIMTDKAKNGIKVNFKIRHNIEDGSVQLADHYQQNTPIGDGPVLLPDNHYLSTQSALSKDPNEKRDHMIYFGFVTAAAITHGMDELYKGGSGGGTSVGSLNCIVAVSQNMGIGKNGDLPWPPLRNEFRYFKRMTTTSSVEGKQNLVIMGKKTWFSIPEKNRPLKGRINLVLSRELKEPPQGAHFLSRSLDDALKLTEQPELANKVDMVWIVGGSSVIKEAMNHPGHLKLFVTRIMQDFESDTFFPEIDLEKYKLLPEYPGVLSDVQEEKGIKYKFEVYEKND

SEQ ID NO: 1281 - protein, 433 aa, synthetic construct; identical to SEQ ID NO: 1280
  REGION 1..433: note = Description of Artificial Sequence: Synthetic polypeptide

SEQ ID NO: 1282 - protein, 433 aa, synthetic construct
  REGION 1..433: note = Description of Artificial Sequence: Synthetic polypeptide
MVSKGAELFTGIVPILIELNGDVNGHKFSVSGEGEGDATYGKLTLKFICTTGKLPVPWPTLVTTLSYGVQCFSRYPDHMKQHDFFKSAMPEGYIQERTIFFEDDGNYKSRAEVKFEGDTLVNRIELTGTDFKEDGNILGNKMEYNYNAHNVYIMTDKAKNGIKVNFKIRHNIEDGSVQLADHYQQNTPIGDGPVLLPDNHYLSTQSALSKDPNEKRDHMIYFGFVTAAAITHGMDELYKGGSGGGTSVGSLNCIVAVSQNMGIGKNGDLPWPPLRNEFRYFQRMTTTSSVEGKQNLVIMGKKTWFSIPEKNRPLKGRINLVLSRELKEPPQGAHFLSRSLDDALKLTEQPELANKVDMVWIVGGSSAIKEAMNHPGHLKLFVTRIMQDFESDTFFPEIDLEKYKLLPEYPGVLSDVQEEKGIKYKFEVYEKND

SEQ ID NO: 1283 - protein, 433 aa, synthetic construct
  REGION 1..433: note = Description of Artificial Sequence: Synthetic construct
MVSKGAELFTGIVPILIELNGDVNGHKFSVSGEGEGDATYGKLTLKFICTTGKLPVPWPTLVTTLSYGVQCFSRYPDHMKQHDFFKSAMPEGYIQERTIFFEDDGNYKSRAEVKFEGDTLVNRIELTGTDFKEDGNILGNKMEYNYNAHNVYIMTDKAKNGIKVNFKIRHNIEDGSVQLADHYQQNTPIGDGPVLLPDNHYLSTQSALSKDPNEKRDHMIYFGFVTAAAITHGMDELYKGGSGGGTSVGSLNCIVAVSQNMGIGKNGSLPWPPLRNEMSYFSRMTTTSSVEGKQNLVIMGKKTWFSIPEKSRPLKGRINLVLSRELKEPPQGAHFLSRSLDDALKLTEQPELANKVDMVWIVGGSSVYKEAMNHPGHLKLFVTRIMQDFESDTFFPEIDLEKYKLLPEYPGVLSDVQEEKGIKYKFEVYEKND

SEQ ID NO: 1284 - protein, 433 aa, synthetic construct
  REGION 1..433: note = Description of Artificial Sequence: Synthetic construct
MVSKGAELFTGIVPILIELNGDVNGHKFSVSGEGEGDATYGKLTLKFICTTGKLPVPWPTLVTTLSYGVQCFSRYPDHMKQHDFFKSAMPEGYIQERTIFFEDDGNYKSRAEVKFEGDTLVNRIELTGTDFKEDGNILGNKMEYNYNAHNVYIMTDKAKNGIKVNFKIRHNIEDGSVQLADHYQQNTPIGDGPVLLPDNHYLSTQSALSKDPNEKRDHMIYFGFVTAAAITHGMDELYKGGSGGGTSVGSLNCIVAVSQNMGIGKNGDLPWPPLRNDMRYFQRMTTTSSVEGKQNLVIMGKKTWFSIPEKNRPLKGRINLVLSRELKEPPQGAHFLSRSLDDALKLTEQPELANKVDMVWIIGGSSVYKEAMNHPGHLKLFVTRIMQDFESDTFFPEIDLEKYKLLPEYPGVLSDVQEEKGIKYKFEVYEKND

SEQ ID NO: 1285 - protein, 433 aa, synthetic construct
  REGION 1..433: note = Description of Artificial Sequence: Synthetic construct
MVSKGAELFTGIVPILIELNGDVNGHKFSVSGEGEGDATYGKLTLKFICTTGKLPVPWPTLVTTLSYGVQCFSRYPDHMKQHDFFKSAMPEGYIQERTIFFEDDGNYKSRAEVKFEGDTLVNRIELTGTDFKEDGNILGNKMEYNYNAHNVYIMTDKAKNGIKVNFKIRHNIEDGSVQLADHYQQNTPIGDGPVLLPDNHYLSTQSALSKDPNEKRDHMIYFGFVTAAAITHGMDELYKGGSGGGTSVGSLNCIVAVSQNMGVGKNGDLPWPPLRNEFRYFQRMTTTSSVEGKQNLVIMGKKTWFSIPEKNRPLKGRINLVLSRELKEPPQGAHFLSRSLDDALKLTEQPELANKVDMVWIVGGSSVIKEAMNHPGHLKLFVTRIMQDFESDTFFPEIDLEKYKLLPEYPGVLSDVQEEKGIKYKFEVYEKND

SEQ ID NO: 1286 - protein, 433 aa, synthetic construct
  REGION 1..433: note = Description of Artificial Sequence: Synthetic construct
MVSKGAELFTGIVPILIELNGDVNGHKFSVSGEGEGDATYGKLTLKFICTTGKLPVPWPTLVTTLSYGVQCFSRYPDHMKQHDFFKSAMPEGYIQERTIFFEDDGNYKSRAEVKFEGDTLVNRIELTGTDFKEDGNILGNKMEYNYNAHNVYIMTDKAKNGIKVNFKIRHNIEDGSVQLADHYQQNTPIGDGPVLLPDNHYLSTQSALSKDPNEKRDHMIYFGFVTAAAITHGMDELYKGGSGGGTSVGSLNCIVAVSQNMGIGKNGDLPWPPLRNEFRYFQRMTTTSSVEGKQNLVIMGKKTWFSIPEKNRPLKGRINLVLSRELKEPPQGAHFLSRSLDDALKLTEQPELANKVDMVWIVGGSSVIKEAMNHPGHLKLFVTRIIQDFESDTFFPEIDLEKYKLLPEYPGVLSDVQEEKGIKYKFEVYEKND

SEQ ID NO: 1287 - protein, 433 aa, synthetic construct
  REGION 1..433: note = Description of Artificial Sequence: Synthetic construct
MVSKGAELFTGIVPILIELNGDVNGHKFSVSGEGEGDATYGKLTLKFICTTGKLPVPWPTLVTTLSYGVQCFSRYPDHMKQHDFFKSAMPEGYIQERTIFFEDDGNYKSRAEVKFEGDTLVNRIELTGTDFKEDGNILGNKMEYNYNAHNVYIMTDKAKNGIKVNFKIRHNIEDGSVQLADHYQQNTPIGDGPVLLPDNHYLSTQSALSKDPNEKRDHMIYFGFVTAAAITHGMDELYKGGSGGGTSVGSLNCIVAVSQNMGIGKNGDLPWPPLRNEFRYFQRMTTTSSVEGKQNLVIMGKKTWFSIPEKNRPLKGRINLVLSRELKEPPQGAHFLSRSLDDALKLTEQPELANKVDMVWIVGGSSVIKEAMYHPGHLKLFVTRIMQDFESDTFFPEIDLEKYKLLPEYPGVLSDVQEEKGIKYKFEVYEKND

SEQ ID NO: 1288 - protein, 433 aa, synthetic construct
  REGION 1..433: note = Description of Artificial Sequence: Synthetic construct
MVSKGAELFTGIVPILIELNGDVNGHKFSVSGEGEGDATYGKLTLKFICTTGKLPVPWPTLVTTLSYGVQCFSRYPDHMKQHDFFKSAMPEGYIQERTIFFEDDGNYKSRAEVKFEGDTLVNRIELTGTDFKEDGNILGNKMEYNYNAHNVYIMTDKAKNGIKVNFKIRHNIEDGSVQLADHYQQNTPIGDGPVLLPDNHYLSTQSALSKDPNEKRDHMIYFGFVTAAAITHGMDELYKGGSGGGTSVGSLNCIVAVSQNMGIGKNGDLPWPPLRNEFRYFQRMTTTSSVEGKQNLVIMGKKTWFSIPEKNRPLKGRINLVLSRELKEPPQGAHFLSRSLDDALKLTEQPELANKVDMVWIVGGSSVIKEAMNHPGRLKLFVTRIMQDFGSDTFFPEIDLEKYKLLPEYPGVLSDVQEEKGIKYKFEVYEKND

SEQ ID NO: 1289 - protein, 738 aa, synthetic construct
  REGION 1..738: note = Description of Artificial Sequence: Synthetic construct
MEDAKNIKKGPAPFYPLEDGTAGEQLHKAMKRYALVPGTIAFTDAHIEVDITYAEYFEMSVRLAEAMKRYGLNTNHRIVVCSENSLQFFMPVLGALFIGVAVAPANDIYNERELLNSMGISQPTVVFVSKKGLQKILNVQKKLPIIQKIIIMDSKTDYQGFQSMYTFVTSHLPPGFNEYDFVPESFDRDKTIALIMNSSGSTGLPKGVALPHRTACVRFSHARDPIFGNQIIPDTAILSVVPFHHGFGMFTTLGYLICGFRVVLMYRFEEELFLRSLQDYKIQSALLVPTLFSFFAKSTLIDKYDLSNLHEIASGGAPLSKEVGEAVAKRFHLPGIRQGYGLTETTSAILITPEGDDKPGAVGKVVPFFEAKVVDLDTGKTLGVNQRGELCVRGPMIMSGYVNNPEATNALIDKDGWLHSGDIAYWDEDEHFFIVDRLKSLIKYKGYQVAPAELESILLQHPNIFDAGVAGLPDDDAGELPAAVVVLEHGKTMTEKEIVDYVASQVTTAKKLRGGVVFVDEVPKGLTGKLDARKIREILIKAKKGGKIAVSGVGSLNCIVAVSQNMGIGKNGDLPWPPLRNEFRYFQRMTTTSSVEGKQNLVIMGKKTWFSIPEKNRPLKGRINLVLSRELKEPPQGAHFLSRSLDDALKLTEQPELANKVDMVWIVGGSSVYKEAMNHPGHLKLFVTRIMQDFESDTFFPEIDLEKYKLLPEYPGVLSDVQEEKGIKYKFEVYEKDD

SEQ ID NO: 1290 - protein, 738 aa, synthetic construct
  REGION 1..738: note = Description of Artificial Sequence: Synthetic construct
MEDAKNIKKGPAPFYPLEDGTAGEQLHKAMKRYALVPGTIAFTDAHIEVDITYAEYFEMSVRLAEAMKRYGLNTNHRIVVCSENSLQFFMPVLGALFIGVAVAPANDIYNERELLNSMGISQPTVVFVSKKGLQKILNVQKKLPIIQKIIIMDSKTDYQGFQSMYTFVTSHLPPGFNEYDFVPESFDRDKTIALIMNSSGSTGLPKGVALPHRTACVRFSHARDPIFGNQIIPDTAILSVVPFHHGFGMFTTLGYLICGFRVVLMYRFEEELFLRSLQDYKIQSALLVPTLFSFFAKSTLIDKYDLSNLHEIASGGAPLSKEVGEAVAKRFHLPGIRQGYGLTETTSAILITPEGDDKPGAVGKVVPFFEAKVVDLDTGKTLGVNQRGELCVRGPMIMSGYVNNPEATNALIDKDGWLHSGDIAYWDEDEHFFIVDRLKSLIKYKGYQVAPAELESILLQHPNIFDAGVAGLPDDDAGELPAAVVVLEHGKTMTEKEIVDYVASQVTTAKKLRGGVVFVDEVPKGLTGKLDARKIREILIKAKKGGKIAVSGVGSLNCIVAVSQNMGIGKNGDLPWPPLRNEFRYFQRMTTTSSVEGKQNLVIMGKKTWFSIPEKNRPLKGRINLVLSRELKEPPQGAHFLSRSLDDALKLTEQPELANKVDMVWIVGGSSVYKEAMNHPGHLKLFVTRIIQDFESDTFFPEIDLEKYKLLPEYPGVLSDVQEEKGIKYKFEVYEKND

SEQ ID NO: 1291 - protein, 738 aa, synthetic construct
  REGION 1..738: note = Description of Artificial Sequence: Synthetic construct
MEDAKNIKKGPAPFYPLEDGTAGEQLHKAMKRYALVPGTIAFTDAHIEVDITYAEYFEMSVRLAEAMKRYGLNTNHRIVVCSENSLQFFMPVLGALFIGVAVAPANDIYNERELLNSMGISQPTVVFVSKKGLQKILNVQKKLPIIQKIIIMDSKTDYQGFQSMYTFVTSHLPPGFNEYDFVPESFDRDKTIALIMNSSGSTGLPKGVALPHRTACVRFSHARDPIFGNQIIPDTAILSVVPFHHGFGMFTTLGYLICGFRVVLMYRFEEELFLRSLQDYKIQSALLVPTLFSFFAKSTLIDKYDLSNLHEIASGGAPLSKEVGEAVAKRFHLPGIRQGYGLTETTSAILITPEGDDKPGAVGKVVPFFEAKVVDLDTGKTLGVNQRGELCVRGPMIMSGYVNNPEATNALIDKDGWLHSGDIAYWDEDEHFFIVDRLKSLIKYKGYQVAPAELESILLQHPNIFDAGVAGLPDDDAGELPAAVVVLEHGKTMTEKEIVDYVASQVTTAKKLRGGVVFVDEVPKGLTGKLDARKIREILIKAKKGGKIAVSGVGSLNCIVAVSQNMGIGKNGDLPWPPLRNEFRYFQRMTTTSSVEGKQNLVIMGKKTWFSIPEKNRPLKGRINLVLSRELKEPPQGAHFLSRSLDDALKLTEQPELANKVDMVWIVGGSSVYKEAMYHPGHLKLFVTRIMQDFESDTFFPEIDLEKYKLLPEYPGVLSDVQEEKGIKYKFEVYEKND

SEQ ID NO: 1292 - protein, 738 aa, synthetic construct
  REGION 1..738: note = Description of Artificial Sequence: Synthetic construct
MEDAKNIKKGPAPFYPLEDGTAGEQLHKAMKRYALVPGTIAFTDAHIEVDITYAEYFEMSVRLAEAMKRYGLNTNHRIVVCSENSLQFFMPVLGALFIGVAVAPANDIYNERELLNSMGISQPTVVFVSKKGLQKILNVQKKLPIIQKIIIMDSKTDYQGFQSMYTFVTSHLPPGFNEYDFVPESFDRDKTIALIMNSSGSTGLPKGVALPHRTACVRFSHARDPIFGNQIIPDTAILSVVPFHHGFGMFTTLGYLICGFRVVLMYRFEEELFLRSLQDYKIQSALLVPTLFSFFAKSTLIDKYDLSNLHEIASGGAPLSKEVGEAVAKRFHLPGIRQGYGLTETTSAILITPEGDDKPGAVGKVVPFFEAKVVDLDTGKTLGVNQRGELCVRGPMIMSGYVNNPEATNALIDKDGWLHSGDIAYWDEDEHFFIVDRLKSLIKYKGYQVAPAELESILLQHPNIFDAGVAGLPDDDAGELPAAVVVLEHGKTMTEKEIVDYVASQVTTAKKLRGGVVFVDEVPKGLTGKLDARKIREILIKAKKGGKIAVSGVGSLNCIVAVSQNMGIGKNGDLPWPPLRNEFRYFQRMTTTSSVEGKQNLVIMGKKTWFSIPEKNRPLKGRINLVLSRELKEPPQGAHFLSRSLDDALKLTEQPELANKVDMVWIVGGSSVIKEAMNHPGHLKLFVTRIMQDFESDTFFPEIDLEKYKLLPEYPGVLSDVQEEKGIKYKFEVYEKND

SEQ ID NO: 1293 - protein, 427 aa, synthetic construct
  REGION 1..427: note = Description of Artificial Sequence: Synthetic construct
MVSKGAELFTGIVPILIELNGDVNGHKFSVSGEGEGDATYGKLTLKFICTTGKLPVPWPTLVTTLSYGVQCFSRYPDHMKQHDFFKSAMPEGYIQERTIFFEDDGNYKSRAEVKFEGDTLVNRIELTGTDFKEDGNILGNKMEYNYNAHNVYIMTDKAKNGIKVNFKIRHNIEDGSVQLADHYQQNTPIGDGPVLLPDNHYLSTQSALSKDPNEKRDHMIYFGFVTAAAITHGMDELYKGSVGSLNCIVAVSQNMGIGKNGDLPWPPLRNEFRYFQRMTTTSSVEGKQNLVIMGKKTWFSIPEKNRPLKGRINLVLSRELKEPPQGAHFLSRSLDDALKLTEQPELANKVDMVWIVGGSSVIKEAMNHPGHLKLFVTRIMQDFESDTFFPEIDLEKYKLLPEYPGVLSDVQEEKGIKYKFEVYEKND

SEQ ID NO: 1294 - protein, 242 aa, synthetic construct; identical to SEQ ID NO: 313
  REGION 1..242: note = Description of Artificial Sequence: Synthetic CD19 scFv sequence

SEQ ID NO: 1295 - DNA, 726 bp, synthetic construct
  misc_feature 1..726: note = Description of Artificial Sequence: Synthetic CD19 scFv sequence
  source 1..726: mol_type = other DNA
gacatccagatgacacagaccacaagctccctgtccgcctctctgggcgacagagtgaccatcagctgccgggcctcccaggatatctctaagtatctgaactggtaccagcagaagcccgatggcacagtgaagctgctgatctatcacaccagccgcctgcactccggagtgccttctaggttcagcggctccggctctggcacagactacagcctgaccatctccaacctggagcaggaggatatcgccacctatttctgccagcagggcaatacactgccttacacctttggcggcggcacaaagctggagatcaccggaggaggaggcagcggaggaggaggctccggcggcggcggctctgaggtgaagctgcaggagtccggaccaggcctggtggcacctagccagtccctgtctgtgacatgtaccgtgtccggcgtgtctctgccagactacggcgtgtcttggatcaggcagccacctaggaagggcctggagtggctgggcgtgatctggggcagcgagacaacatactataattctgccctgaagagcagactgacaatcatcaaggacaacagcaagtcccaggtgttcctgaagatgaatagcctgcagacagacgataccgccatctactattgcgccaagcactactattacggcggcagctatgccatggattactggggccagggcacatccgtgaccgtgtctagc

SEQ ID NO: 1296 - DNA, 726 bp, synthetic construct
  misc_feature 1..726: note = Description of Artificial Sequence: Synthetic CD19 scFv sequence
  source 1..726: mol_type = other DNA
gacatccagatgacacagaccacaagctccctgagcgcctccctgggcgacagagtgaccatctcttgccgggccagccaggatatctccaagtatctgaactggtaccagcagaagcccgatggcacagtgaagctgctgatctatcacacctctcgcctgcacagcggcgtgccttccaggttctctggcagcggctccggcacagactactctctgaccatcagcaacctggagcaggaggatatcgccacctatttctgccagcagggcaatacactgccctacacctttggcggcggcacaaagctggagatcaccggcggcggcggctctggaggaggaggcagcggcggaggaggctccgaggtgaagctgcaggagtccggaccaggcctggtggcaccatctcagagcctgtccgtgacatgtaccgtgagcggcgtgtccctgcctgactacggcgtgagctggatcagacagccacctaggaagggcctggagtggctgggcgtgatctggggctccgagacaacatactataactccgccctgaagtctcggctgaccatcatcaaggacaactctaagagccaggtgttcctgaagatgaattccctgcagacagacgataccgccatctactattgcgccaagcactactattacggcggctcctatgccatggattactggggccagggcacatctgtgaccgtgtctagc

SEQ ID NO: 1297 - DNA, 726 bp, synthetic construct
  misc_feature 1..726: note = Description of Artificial Sequence: Synthetic CD19 scFv sequence
  source 1..726: mol_type = other DNA
gacatccagatgacacagaccacaagctccctgagcgcctccctgggcgacagagtgaccatcagctgccgggcctcccaggatatctctaagtatctgaactggtaccagcagaagccagatggcacagtgaagctgctgatctatcacaccagccgcctgcactccggagtgccctctaggttctctggcagcggctccggcacagactacagcctgaccatctccaacctggagcaggaggatatcgccacctatttctgccagcagggcaatacactgccatacacctttggcggcggcacaaagctggagatcaccggaggaggaggcagcggaggaggaggctccggcggcggcggctctgaggtgaagctgcaggagtccggaccaggcctggtggcaccttctcagagcctgtccgtgacatgtaccgtgtctggcgtgagcctgcccgactacggcgtgtcttggatcagacagccacctaggaagggcctggagtggctgggcgtgatctggggcagcgagacaacatactataattctgccctgaagagcaggctgaccatcatcaaggacaactctaagagccaggtgttcctgaagatgaattccctgcagacagacgataccgccatctactattgcgccaagcactactattacggcggctcttatgccatggattactggggccagggcacaagcgtgaccgtgtctagc

SEQ ID NO: 1298 - DNA, 726 bp, synthetic construct
  misc_feature 1..726: note = Description of Artificial Sequence: Synthetic CD19 scFv sequence
  source 1..726: mol_type = other DNA
gacatccagatgacacagaccacaagctccctgagcgcctccctgggcgacagagtgaccatctcttgccgggccagccaggatatctccaagtatctgaactggtaccagcagaagccagatggcacagtgaagctgctgatctatcacacctctcgcctgcacagcggagtgccctccaggttctctggcagcggctccggcacagactactctctgaccatcagcaacctggagcaggaggatatcgccacctatttctgccagcagggcaatacactgccctacacctttggcggcggcacaaagctggagatcaccggcggcggcggctctggaggaggaggcagcggcggaggaggctccgaggtgaagctgcaggagtccggaccaggcctggtggcaccatctcagagcctgtccgtgacatgtaccgtgagcggcgtgtccctgcctgactacggcgtgagctggatcagacagccacctaggaagggcctggagtggctgggcgtgatctggggctccgagacaacatactataattccgccctgaagtctcggctgacaatcatcaaggacaactctaagagccaggtgtttctgaagatgaatagcctgcagacagacgataccgccatctactattgcgccaagcactactattacggcggctcctatgccatggattactggggccagggcacatctgtgaccgtgtctagc

SEQ ID NO: 1299 - DNA, 726 bp, synthetic construct
  misc_feature 1..726: note = Description of Artificial Sequence: Synthetic CD19 scFv sequence
  source 1..726: mol_type = other DNA
gacatccagatgacacagaccacaagctccctgagcgcctccctgggcgacagagtgaccatcagctgccgggcctcccaggatatctctaagtatctgaactggtaccagcagaagccagatggcacagtgaagctgctgatctatcacaccagccgcctgcactccggagtgccctctaggttctctggcagcggctccggcacagactacagcctgaccatctccaacctggagcaggaggatatcgccacctatttctgccagcagggcaatacactgccatacacctttggcggcggcacaaagctggagatcaccggaggaggaggcagcggaggaggaggctccggcggcggcggctctgaggtgaagctgcaggagtccggaccaggcctggtggcaccttctcagagcctgtccgtgacatgtaccgtgtctggcgtgagcctgcccgactacggcgtgtcttggatcagacagccacctaggaagggcctggagtggctgggcgtgatctggggcagcgagacaacatactataattctgccctgaagagcaggctgacaatcatcaaggacaactctaagagccaggtgtttctgaagatgaatagcctgcagacagacgataccgccatctactattgtgccaagcactactattacggcggcagctatgccatggattactggggccagggcacatccgtgaccgtgtctagc

SEQ ID NO: 1300 - protein, 69 aa, Homo sapiens; identical to SEQ ID NO: 607

SEQ ID NO: 1301 - DNA, 207 bp, Homo sapiens
  source 1..207: mol_type = other DNA
accacgacgccagcgccgcgaccaccaacaccggcgcccaccatcgcgtcgcagcccctgtccctgcgcccagaggcgtgccggccagcggcggggggcgcagtgcacacgagggggctggacttcgcctgtgatatctacatctgggcgcccttggccgggacttgtggggtccttctcctgtcactggttatcactttactgccc

SEQ ID NO: 1302 - protein, 45 aa, Homo sapiens; identical to SEQ ID NO: 601

SEQ ID NO: 1303 - DNA, 135 bp, synthetic construct
  misc_feature 1..135: note = Description of Artificial Sequence: Synthetic construct
  source 1..135: mol_type = other DNA
accacaaccccagcacctcgcccaccaacaccagcaccaaccatcgcatcccagccactgtctctgaggcccgaggcatgtaggcctgcagcaggaggcgccgtgcacaccaggggcctggactttgcctgcgat

SEQ ID NO: 1304 - DNA, 135 bp, synthetic construct
  misc_feature 1..135: note = Description of Artificial Sequence: Synthetic construct
  source 1..135: mol_type = other DNA
acaacaaccccagcacccagacctccaacacctgcaccaaccatcgcaagccagcctctgtccctgaggcccgaggcatgtaggccagcagcaggaggcgccgtgcacacccggggcctggactttgcctgcgat

SEQ ID NO: 1305 - DNA, 135 bp, synthetic construct
  misc_feature 1..135: note = Description of Artificial Sequence: Synthetic construct
  source 1..135: mol_type = other DNA
accacaaccccagcaccccgcccaccaacacctgcaccaaccatcgcctcccagccactgtctctgaggcccgaggcatgtaggcctgcagcaggaggcgccgtgcacaccaggggcctggactttgcctgcgat

SEQ ID NO: 1306 - DNA, 135 bp, synthetic construct
  misc_feature 1..135: note = Description of Artificial Sequence: Synthetic construct
  source 1..135: mol_type = other DNA
accacaaccccagcacccagaccaccaacacctgcaccaaccatcgcaagccagcctctgtccctgcgcccagaggcatgcaggccagcagcaggaggagcagtgcacacccggggcctggacttcgcatgtgat

SEQ ID NO: 1307 - DNA, 135 bp, synthetic construct
  misc_feature 1..135: note = Description of Artificial Sequence: Synthetic construct
  source 1..135: mol_type = other DNA
accacaaccccagcacctcgcccaccaacaccagcaccaaccatcgcatcccagccactgtctctgcgccccgaggcatgcaggcctgcagcaggcggcgccgtgcacaccaggggcctggacttcgcctgtgat

SEQ ID NO: 1308 - protein, 112 aa, Homo sapiens; identical to SEQ ID NO: 419

SEQ ID NO: 1309 - DNA, 338 bp, synthetic construct
  misc_feature 1..338: note = Description of Artificial Sequence: Synthetic construct
  source 1..338: mol_type = other DNA
agggtgaagttttctaggagcgccgatgcaccagcatataagcagggacagaaccagctgtacaacgagctgaatctgggcaggagagaggagtacgacgtgctggataagaggaggggaagggaccccgagatgggaggcaagccaaggagaaagaacccccaggagggcctgtataatgagctgcagaaggacaagatggccgaggcctactccgagatcggcatgaagggagagcggcgcaggggcaagggacacgatggcctgtatcagggcctgtctacagccaccaaggacacctacgatgcactgcacatgcaggccctgcctccaaggtg

SEQ ID NO: 1310 - DNA, 338 bp, synthetic construct
  misc_feature 1..338: note = Description of Artificial Sequence: Synthetic construct
  source 1..338: mol_type = other DNA
agggtgaagttttccaggtctgccgatgcccccgcctataagcagggccagaatcagctgtacaacgagctgaatctgggcaggagagaggagtacgacgtgctggataagaggaggggacgcgaccccgagatgggaggcaagcctaggagaaagaacccacaggagggcctgtataatgagctgcagaaggacaagatggccgaggcctactctgagatcggcatgaagggagagcggcgcaggggcaagggacacgatggcctgtatcagggcctgagcacagccaccaaggacacctacgatgcactgcacatgcaggccctgccacctaggtg

SEQ ID NO: 1311 - DNA, 338 bp, synthetic construct
  misc_feature 1..338: note = Description of Artificial Sequence: Synthetic construct
  source 1..338: mol_type = other DNA
agggtgaagtttagcaggtccgccgatgccccagcctataagcagggccagaaccagctgtacaacgagctgaatctgggcaggagggaagagtacgacgtgctggataagaggagaggaagggaccccgagatgggaggcaagccaaggaggaagaacccacaggagggcctgtataatgagctgcagaaggacaagatggccgaggcctacagcgagatcggcatgaagggagagaggagacggggcaagggacacgatggcctgtatcagggcctgtccacagccaccaaggacacctacgatgcactgcacatgcaggccctgcctccaaggtg

SEQ ID NO: 1312 - DNA, 338 bp, synthetic construct
  misc_feature 1..338: note = Description of Artificial Sequence: Synthetic construct
  source 1..338: mol_type = other DNA
agggtgaagttttccaggtctgccgatgccccagcctataagcagggccagaatcagctgtacaacgagctgaatctgggcaggagagaggagtacgacgtgctggataagaggaggggacgcgaccccgagatgggaggcaagcctaggagaaagaacccacaggagggcctgtataatgagctgcagaaggacaagatggccgaggcctactctgagatcggcatgaagggagagcggcgcaggggcaagggacacgatggcctgtatcagggcctgagcacagccaccaaggacacctacgatgcactgcacatgcaggccctgccacctaggtg

SEQ ID NO: 1313 - DNA, 338 bp, synthetic construct
  misc_feature 1..338: note = Description of Artificial Sequence: Synthetic construct
  source 1..338: mol_type = other DNA
agggtgaagtttagcaggtccgccgatgccccagcctataagcagggccagaaccagctgtacaacgagctgaatctgggcaggagggaagagtacgacgtgctggataagaggagaggaagggaccccgagatgggaggcaagccaaggaggaagaacccacaggagggcctgtataatgagctgcagaaggacaagatggccgaggcctactccgagatcggcatgaagggagagaggagacggggcaagggacacgatggcctgtatcagggcctgtctacagccaccaaggacacctacgatgcactgcacatgcaggccctgcctccaaggtg

SEQ ID NO: 1314 - protein, 42 aa, Homo sapiens; identical to SEQ ID NO: 426

SEQ ID NO: 1315 - DNA, 126 bp, synthetic construct
  misc_feature 1..126: note = Description of Artificial Sequence: Synthetic construct
  source 1..126: mol_type = other DNA
aagagaggccggaagaagctgctgtacatcttcaagcagcccttcatgaggcccgtgcagacaacccaggaggaggacggctgcagctgtcggttcccagaggaggaggagggaggatgtgagctg

SEQ ID NO: 1316 - DNA, 126 bp, synthetic construct
  misc_feature 1..126: note = Description of Artificial Sequence: Synthetic construct
  source 1..126: mol_type = other DNA
aagcgcggcaggaagaagctgctgtacatcttcaagcagccctttatgcgccctgtgcagacaacccaggaggaggacggctgcagctgtaggttcccagaggaggaggagggaggatgtgagctg

SEQ ID NO: 1317 - DNA, 126 bp, synthetic construct
  misc_feature 1..126: note = Description of Artificial Sequence: Synthetic construct
  source 1..126: mol_type = other DNA
aagcgcggcaggaagaagctgctgtacatcttcaagcagccttttatgcgcccagtgcagacaacccaggaggaggacggctgcagctgtaggttccctgaggaggaggagggaggatgtgagctg

SEQ ID NO: 1318 - DNA, 126 bp, synthetic construct
  misc_feature 1..126: note = Description of Artificial Sequence: Synthetic construct
  source 1..126: mol_type = other DNA
aagcgcggcaggaagaagctgctgtacatcttcaagcagccctttatgcgccctgtgcagacaacccaggaggaggacggctgcagctgtaggttccctgaggaggaggagggaggatgtgagctg

SEQ ID NO: 1319 - DNA, 126 bp, synthetic construct
  misc_feature 1..126: note = Description of Artificial Sequence: Synthetic construct
  source 1..126: mol_type = other DNA
aagcgcggcaggaagaagctgctgtacatcttcaagcagccttttatgcgcccagtgcagacaacccaggaggaggacggctgcagctgtaggttccctgaggaggaggagggaggatgcgagctg

SEQ ID NO: 1320 - protein, 21 aa, Homo sapiens
MALPVTALLLPLALLLHAARP

SEQ ID NO: 1321 - DNA, 63 bp, Homo sapiens
  source 1..63: mol_type = other DNA
atggccttaccagtgaccgccttgctcctgccgctggccttgctgctccacgccgccaggccg

SEQ ID NO: 1322 - DNA, 63 bp, synthetic construct
  misc_feature 1..63: note = Description of Artificial Sequence: Synthetic signal sequence
  source 1..63: mol_type = other DNA
atggcactgcctgtgaccgccctgctgctgccactggccctgctgctgcacgcagccaggccc

SEQ ID NO: 1323 - DNA, 63 bp, synthetic construct
  misc_feature 1..63: note = Description of Artificial Sequence: Synthetic signal sequence
  source 1..63: mol_type = other DNA
atggcactgccagtgacagccctgctgctgcctctggccctgctgctgcacgcagccagacct

SEQ ID NO: 1324 - DNA, 63 bp, synthetic construct
  misc_feature 1..63: note = Description of Artificial Sequence: Synthetic signal sequence
  source 1..63: mol_type = other DNA
atggcactgcctgtgacagccctgctgctgccactggccctgctgctgcacgcagcccgccct

SEQ ID NO: 1325 - DNA, 63 bp, synthetic construct
  misc_feature 1..63: note = Description of Artificial Sequence: Synthetic signal sequence
  source 1..63: mol_type = other DNA
atggcactgcctgtgaccgccctgctgctgccactggccctgctgctgcacgcagcccgccct

SEQ ID NO: 1326 - DNA, 63 bp, synthetic construct
  misc_feature 1..63: note = Description of Artificial Sequence: Synthetic signal sequence
  source 1..63: mol_type = other DNA
atggcactgcctgtgaccgccctgctgctgccactggccctgctgctgcacgcagccaggcct

SEQ ID NO: 1327 - DNA, 63 bp, synthetic construct
  misc_feature 1..63: note = Description of Artificial Sequence: Synthetic signal sequence
  source 1..63: mol_type = other DNA
atggcactgccagtgaccgccctgctgctgcctctggccctgctgctgcacgcagccagacca

SEQ ID NO: 1328 - DNA, 63 bp, synthetic construct
  misc_feature 1..63: note = Description of Artificial Sequence: Synthetic signal sequence
  source 1..63: mol_type = other DNA
atggcactgcctgtgaccgccctgctgctgccactggccctgctgctgcacgcagccaggcca

SEQ ID NO: 1329 - protein, 5 aa, synthetic construct
  REGION 1..5: note = Description of Artificial Sequence: Synthetic linker
GGSGG

SEQ ID NO: 1330 - DNA, 15 bp, synthetic construct
  misc_feature 1..15: note = Description of Artificial Sequence: Synthetic linker
  source 1..15: mol_type = other DNA
ggaggcagcggagga

SEQ ID NO: 1331 - DNA, 15 bp, synthetic construct
  misc_feature 1..15: note = Description of Artificial Sequence: Synthetic linker
  source 1..15: mol_type = other DNA
ggaggctctggagga

SEQ ID NO: 1332 - DNA, 15 bp, synthetic construct
  misc_feature 1..15: note = Description of Artificial Sequence: Synthetic linker
  source 1..15: mol_type = other DNA
ggaggctccggcgga

SEQ ID NO: 1333 - DNA, 15 bp, synthetic construct
  misc_feature 1..15: note = Description of Artificial Sequence: Synthetic linker
  source 1..15: mol_type = other DNA
ggaggatccggaggc

SEQ ID NO: 1334 - DNA, 15 bp, synthetic construct
  misc_feature 1..15: note = Description of Artificial Sequence: Synthetic linker
  source 1..15: mol_type = other DNA
ggaggatctggagga

SEQ ID NO: 1335 - skipped

SEQ ID NO: 1336 - protein, 12 aa, synthetic construct
  REGION 1..12: note = Description of Artificial Sequence: Synthetic cleavage site
ESRRVRRNKRSK

SEQ ID NO: 1337 - DNA, 36 bp, synthetic construct
  misc_feature 1..36: note = Description of Artificial Sequence: Synthetic cleavage site
  source 1..36: mol_type = other DNA
gagtctaggcgcgtgcggagaaataagcggagcaag

SEQ ID NO: 1338 - DNA, 36 bp, synthetic construct
  misc_feature 1..36: note = Description of Artificial Sequence: Synthetic cleavage site
  source 1..36: mol_type = other DNA
gagtctcggagagtgaggcgcaataagaggagcaag

SEQ ID NO: 1339 - DNA, 36 bp, synthetic construct
  misc_feature 1..36: note = Description of Artificial Sequence: Synthetic cleavage site
  source 1..36: mol_type = other DNA
gagtccaggagagtgcggcgcaacaagaggagcaag

SEQ ID NO: 1340 - protein, 677 aa, synthetic construct; identical to SEQ ID NO: 676
  REGION 1..677: note = Description of Artificial Sequence: Synthetic polypeptide

SEQ ID NO: 1341 - protein, 677 aa, synthetic construct; identical to SEQ ID NO: 677
  REGION 1..677: note = Description of Artificial Sequence: Synthetic polypeptide

SEQ ID NO: 1342 - protein, 677 aa, synthetic construct; identical to SEQ ID NO: 678
  REGION 1..677: note = Description of Artificial Sequence: Synthetic polypeptide

SEQ ID NO: 1343 - protein, 677 aa, synthetic construct; identical to SEQ ID NO: 679
  REGION 1..677: note = Description of Artificial Sequence: Synthetic polypeptide

SEQ ID NO: 1344 - protein, 686 aa, synthetic construct; identical to SEQ ID NO: 682
  REGION 1..686: note = Description of Artificial Sequence: Synthetic polypeptide

SEQ ID NO: 1345 - protein, 686 aa, synthetic construct; identical to SEQ ID NO: 683
  REGION 1..686: note = Description of Artificial Sequence: Synthetic polypeptide

SEQ ID NO: 1346 - protein, 107 aa, Homo sapiens
IEVMYPPPYLDNEKSNGTIIHVKGKHLCPSPLFPGPSKPFWVLVVVGGVLACYSLLVTVAFIIFWVRSKRSRLLHSDYMNMTPRRPGPTRKHYQPYAPPRDFAAYRS

SEQ ID NO: 1347 - protein, 65 aa, synthetic construct
  REGION 1..65: note = Description of Artificial Sequence: Synthetic polypeptide
VMYPPPYLDNEKSNGTIIHVKGKHLCPSPLFPGPSKPFWVLVVVGGVLACYSLLVTVAFIIFWVR

SEQ ID NO: 1348 - protein, 69 aa, synthetic construct; identical to SEQ ID NO: 607
  REGION 1..69: note = Description of Artificial Sequence: Synthetic polypeptide

SEQ ID NO: 1349 - protein, 68 aa, Homo sapiens
TTPAPRPPTPAPTIASQPLSLRPEACRPAAGGAVHTRGLDFACDIYIWAPLAGTCGVLLLSLVITLYC

SEQ ID NO: 1350 - protein, 243 aa, Homo sapiens
DIQMTQSSSYLSVSLGGRVTITCKASDHINNWLAWYQQKPGNAPRLLISGATSLETGVPSRFSGSGSGKDYTLSITSLQTEDVATYYCQQYWSTPFTFGSGTKLEIKGGGGSGGGGSGGGGSQVQLKESGPGLVAPSQSLSITSTVSGFSLSRYSVHWVRQPPGKGLEWLGMIWGGGSTDYNSALKSRLSISKDNSKSQVFLKMNSLQTDDTAMYYCARNEGDTTAGTWFAYWGQGTLVTVSS

SEQ ID NO: 1351 - protein, 62 aa, Homo sapiens
ALSNSIMYFSHFVPVFLPAKPTTTPAPRPPTPAPTIASQPLSLRPEACRPAAGGAVHTRGLD

SEQ ID NO: 1352 - protein, 68 aa, Homo sapiens
TTTPAPRPPTPAPTIASQPLSLRPEACRPAAGGAVHTRGLDFACDIYIWAPLAGTCGVLLLSLVITLY

SEQ ID NO: 1353 - protein, 70 aa, Homo sapiens
KPTTTPAPRPPTPAPTIASQPLSLRPEACRPAAGGAVHTRGLDFACDIYIWAPLAGTCGVLLLSLVITLY

SEQ ID NO: 1354 - protein, 680 aa, synthetic construct
  REGION 1..680: note = Description of Artificial Sequence: Synthetic chimeric antigen receptor
MLLLVTSLLLCELPHPAFLLIPDIQMTQTTSSLSASLGDRVTISCRASQDISKYLNWYQQKPDGTVKLLIYHTSRLHSGVPSRFSGSGSGTDYSLTISNLEQEDIATYFCQQGNTLPYTFGGGTKLEITGSTSGSGKPGSGEGSTKGEVKLQESGPGLVAPSQSLSVTCTVSGVSLPDYGVSWIRQPPRKGLEWLGVIWGSETTYYNSALKSRLTIIKDNSKSQVFLKMNSLQTDDTAIYYCAKHYYYGGSYAMDYWGQGTSVTVSSESKYGPPCPPCPAPEFEGGPSVFLFPPKPKDTLMISRTPEVTCVVVDVSQEDPEVQFNWYVDGVEVHNAKTKPREEQFNSTYRVVSVLTVLHQDWLNGKEYKCKVSNKGLPSSIEKTISKAKGQPREPQVYTLPPSQEEMTKNQVSLTCLVKGFYPSDIAVEWESNGQPENNYKTTPPVLDSDGSFFLYSRLTVDKSRWQEGNVFSCSVMHEALHNHYTQKSLSLSLGKMFWVLVVVGGVLACYSLLVTVAFIIFWVRSKRSRGGHSDYMNMTPRRPGPTRKHYQPYAPPRDFAAYRSGGGRVKFSRSADAPAYQQGQNQLYNELNLGRREEYDVLDKRRGRDPEMGGKPRRKNPQEGLYNELQKDKMAEAYSEIGMKGERRRGKGHDGLYQGLSTATKDTYDALHMQALPPR

SEQ ID NO: 1355 - protein, 680 aa, synthetic construct
  REGION 1..680: note = Description of Artificial Sequence: Synthetic chimeric antigen receptor
MLLLVTSLLLCELPHPAFLLIPDIQMTQTTSSLSASLGDRVTISCRASQDISKYLNWYQQKPDGTVKLLIYHTSRLHSGVPSRFSGSGSGTDYSLTISNLEQEDIATYFCQQGNTLPYTFGGGTKLEITGSTSGSGKPGSGEGSTKGEVKLQESGPGLVAPSQSLSVTCTVSGVSLPDYGVSWIRQPPRKGLEWLGVIWGSETTYYNSALKSRLTIIKDNSKSQVFLKMNSLQTDDTAIYYCAKHYYYGGSYAMDYWGQGTSVTVSSESKYGPPCPPCPAPEFLGGPSVFLFPPKPKDTLMISRTPEVTCVVVDVSQEDPEVQFNWYVDGVEVHNAKTKPREEQFQSTYRVVSVLTVLHQDWLNGKEYKCKVSNKGLPSSIEKTISKAKGQPREPQVYTLPPSQEEMTKNQVSLTCLVKGFYPSDIAVEWESNGQPENNYKTTPPVLDSDGSFFLYSRLTVDKSRWQEGNVFSCSVMHEALHNHYTQKSLSLSLGKMFWVLVVVGGVLACYSLLVTVAFIIFWVRSKRSRGGHSDYMNMTPRRPGPTRKHYQPYAPPRDFAAYRSGGGRVKFSRSADAPAYQQGQNQLYNELNLGRREEYDVLDKRRGRDPEMGGKPRRKNPQEGLYNELQKDKMAEAYSEIGMKGERRRGKGHDGLYQGLSTATKDTYDALHMQALPPR

SEQ ID NO: 1356 - protein, 680 aa, synthetic construct
  REGION 1..680: note = Description of Artificial Sequence: Synthetic chimeric antigen receptor
MLLLVTSLLLCELPHPAFLLIPDIQMTQTTSSLSASLGDRVTISCRASQDISKYLNWYQQKPDGTVKLLIYHTSRLHSGVPSRFSGSGSGTDYSLTISNLEQEDIATYFCQQGNTLPYTFGGGTKLEITGSTSGSGKPGSGEGSTKGEVKLQESGPGLVAPSQSLSVTCTVSGVSLPDYGVSWIRQPPRKGLEWLGVIWGSETTYYNSALKSRLTIIKDNSKSQVFLKMNSLQTDDTAIYYCAKHYYYGGSYAMDYWGQGTSVTVSSESKYGPPCPPCPAPEFEGGPSVFLFPPKPKDTLMISRTPEVTCVVVDVSQEDPEVQFNWYVDGVEVHNAKTKPREEQFQSTYRVVSVLTVLHQDWLNGKEYKCKVSNKGLPSSIEKTISKAKGQPREPQVYTLPPSQEEMTKNQVSLTCLVKGFYPSDIAVEWESNGQPENNYKTTPPVLDSDGSFFLYSRLTVDKSRWQEGNVFSCSVMHEALHNHYTQKSLSLSLGKMFWVLVVVGGVLACYSLLVTVAFIIFWVRSKRSRGGHSDYMNMTPRRPGPTRKHYQPYAPPRDFAAYRSGGGRVKFSRSADAPAYQQGQNQLYNELNLGRREEYDVLDKRRGRDPEMGGKPRRKNPQEGLYNELQKDKMAEAYSEIGMKGERRRGKGHDGLYQGLSTATKDTYDALHMQALPPR

SEQ ID NO: 1357 - protein, 580 aa, synthetic construct
  REGION 1..580: note = Description of Artificial Sequence: Synthetic chimeric antigen receptor
MLLLVTSLLLCELPHPAFLLIPDIQMTQTTSSLSASLGDRVTISCRASQDISKYLNWYQQKPDGTVKLLIYHTSRLHSGVPSRFSGSGSGTDYSLTISNLEQEDIATYFCQQGNTLPYTFGGGTKLEITGSTSGSGKPGSGEGSTKGEVKLQESGPGLVAPSQSLSVTCTVSGVSLPDYGVSWIRQPPRKGLEWLGVIWGSETTYYNSALKSRLTIIKDNSKSQVFLKMNSLQTDDTAIYYCAKHYYYGGSYAMDYWGQGTSVTVSSESKYGPPCPPCPGGGSSGGGSGGQPREPQVYTLPPSQEEMTKNQVSLTCLVKGFYPSDIAVEWESNGQPENNYKTTPPVLDSDGSFFLYSRLTVDKSRWQEGNVFSCSVMHEALHNHYTQKSLSLSLGKMFWVLVVVGGVLACYSLLVTVAFIIFWVRSKRSRGGHSDYMNMTPRRPGPTRKHYQPYAPPRDFAAYRSGGGRVKFSRSADAPAYQQGQNQLYNELNLGRREEYDVLDKRRGRDPEMGGKPRRKNPQEGLYNELQKDKMAEAYSEIGMKGERRRGKGHDGLYQGLSTATKDTYDALHMQALPPR

SEQ ID NO: 1358 - protein, 711 aa, synthetic construct
  REGION 1..711: note = Description of Artificial Sequence: Synthetic chimeric antigen receptor
MLLLVTSLLLLCELPHPAFLLIPDIQMTQQTTSSLSASLGDRVTISCRASSQDISKYLNWYQQKPDGTVKLLLIYHTSRLHSGVPSRFSGSGGSGTDYSLTISNLEQEDIATYYFCQQGNTLPYTFGGGTKLEIITGSTSGSGKPGSGEGSTKGEEVKLQESGPGLVAPSQSLSVTTCTVSGVSLPDYGVSWIRQPPPRKGLEWLGVIWGSETTYYNSSALKSRLTIIKDNSKSQVFLKKMNSLQTDDTAIYYCAKHYYYYGGSYAMDYWGQGTSVTVSSEESKYGPPCPPCPAPEFLGGPSSVFLFPPKPKDTLMISRTPEVVTCVVVDVSQEDPEVQFNWYVVDGVEVHNAKTKPREEQFNSTTYRVVSVLTVLHQDWLNGKEYYKCKVSNKGLPSSIEKTISKAAKGQPREPQVYTLPPSQEEMTTKNQVSLTCLVKGFYPSDIAVVEWESNGQPENNYKTTPPVLDDSDGSFFLYSRLTVDKSRWQEEGNVFSCSVMHEALHNHYTQKKSLSLSLGKMFWVLVVVGGVLLACYSLLVTVAFIIFWVRSKRRSRGGHSDYMNMTPRRPGPTRRKHYQPYAPPRDFAAYRSRVKKFSRSADAPAYQQGQNQLYNEELNLGRREEYDVLDKRRGRDPPEMGGKPRRKNPQEGLYNELQQKDKMAEAYSEIGMKGERRRGGKGHDGLYQGLSTATKDTYDAALHMQALPPR

SEQ ID NO: 1359 - protein, 495 aa, synthetic construct
  REGION 1..495: note = Description of Artificial Sequence: Synthetic chimeric antigen receptor
MALPVTALLLPLALLLHAARPEVQLQQSGPELIKPGASVKMSCKASGYTFTSYVMHWVKQKPGQGLEWIGYINPYNDGTKYNEKFKGKATLTSDKSSSTAYMELSSLTSEDSAVYYCARGTYYYGSRVFDYWGQGTTLTVSSGGGGSGGGGSGGGGSDIVMTQAAPSIPVTPGESVSISCRSSKSLLNSNGNTYLYWFLQRPGQSPQLLIYRMSNLASGVPDRFSGSGSGTAFTLRISRVEAEDVGVYYCMQHLEYPFTFGAGTKLELKRADTTTPAPRPPTPAPTIASQPLSLRPEACRPAAGGAVHTRGLDFACDIYIWAPLAGTCGVLLLSLVITLYCKRGRKKLLYIFKQPFMRPVQTTQEEDGCSCRFPEEEEGGCELRVKFSRSADAPAYQQGQNQLYNELNLGRREEYDVLDKRRGRDPEMGGKPRRKNPQEGLYNELQKDKMAEAYSEIGMKGERRRGKGHDGLYQGLSTATKDTYDALHMQALPPR

SEQ ID NO: 1360 - protein, 495 aa, synthetic construct; identical to SEQ ID NO: 307
  REGION 1..495: note = Description of Artificial Sequence: Synthetic chimeric antigen receptor

SEQ ID NO: 1361 - protein, 484 aa, synthetic construct
  REGION 1..484: note = Description of Artificial Sequence: Synthetic chimeric antigen receptor
MALPVTALLLPLALLLHAARPDIQMTQTTSSLSASLGDRVTISCRASQDISKYLNWYQQKPDGTVKLLIYHTSRLHSGVPSRFSGSGSGTDYSLTISNLEQEDIATYFCQQGNTLPYTFGGGTKLEITGGGGSGGGGSGGGGSEVKLQESGPGLVAPSQSLSVTCTVSGVSLPDYGVSWIRQPPRKGLEWLGVIWGSETTYYNSALKSRLTIIKDNSKSQVFLKMNSLQTDDTAIYYCAKHYYYGGSYAMDYWGQGTSVTVSSTTTPAPRPPTPAPTIASQPLSLRPEACRPAAGGAVHTRGLDFACDMWAPLAGTCGVLLLSLVITLYCKRGRKKLLYIFKQPFMRPVQTTQEEDGCSCRFPEEEEGGCELRVKFSRSADAPAYKQGQNQLYNELNLGRREEYDVLDKRRGRDPEMGGKPRRKNPQEGLYNELQKDKMAEAYSEIGMKGERRRGKGHDGLYQGLSTATKDTYDALHMQALPPR

SEQ ID NO: 1362 - protein, 476 aa, synthetic construct
  REGION 1..476: note = Description of Artificial Sequence: Synthetic chimeric antigen receptor
MLLLVTSLLLCELPHPAFLLIPDIQMTQTTSSLSASLGDRVTISCRASQDISKYLNWYQQKPDGTVKLLIYHTSRLHSGVPSRFSGSGSGTDYSLTISNLEQEDIATYFCQQGNTLPYTFGGGTKLEITGSTSGSGKPGSGEGSTKGEVKLQESGPGLVAPSQSLSVTCTVSGVSLPDYGVSWIRQPPRKGLEWLGVIWGSETTYYNSALKSRLTIIKDNSKSQVFLKMNSLQTDDTAIYYCAKHYYYGGSYAMDYWGQGTSVTVSSESKYGPPCPPCPMFWVLVVVGGVLACYSLLVTVAFIIFWVKRGRKKLLYIFKQPFMRPVQTTQEEDGCSCRFPEEEEGGCELRVKFSRSADAPAYQQGQNQLYNELNLGRREEYDVLDKRRGRDPEMGGKPRRKNPQEGLYNELQKDKMAEAYSEIGMKGERRRGKGHDGLYQGLSTATKDTYDALHMQALPPRLEGGGEGRGSLLTCG

SEQ ID NO: 1363 - protein, 248 aa, synthetic construct
  REGION 1..248: note = Description of Artificial Sequence: Synthetic chimeric antigen receptor
DIQMTQTTSSLSASLGDRVTISCRASQDISKYLNWYQQKPDGTVKLLIYHTSRLHSGVPSRFSGSGSGTDYSLTISNLEQEDIATYFCQQGNTLPYTFGGGTKLEITKAGGGGSGGGGSGGGGSGGGGSEVKLQESGPGLVAPSQSLSVTCTVSGVSLPDYGVSWIRQPPRKGLEWLGVIWGSETTYYNSALKSRLTIIKDNSKSQVFLKMNSLQTDDTAIYYCAKHYYYGGSYAMDYWGQGTSVTVS

SEQ ID NO: 1364 - protein, 254 aa, synthetic construct
  REGION 1..254: note = Description of Artificial Sequence: Synthetic chimeric antigen receptor
RCDIQMTQSPSSLSASVGDRVTITCRASEDIYFNLVWYQQKPGKAPKLLIYDTNRLADGVPSRFSGSGSGTQYTLTISSLQPEDFATYYCQHYKNYPLTFGQGTKLEIKRSGGGGSGGGGSGGGGSGGGGSRSEVQLVESGGGLVQPGGSLRLSCAASGFTLSNYGMHWIRQAPGKGLEWVSSISLNGGSTYYRDSVKGRFTISRDNAKSTLYLQMNSLRAEDTAVYYCAAQDAYTGGYFDYWGQGTLVTVSSM

SEQ ID NO: 1365 - protein, 489 aa, synthetic construct
  REGION 1..489: note = Description of Artificial Sequence: Synthetic chimeric antigen receptor
MALPVTALLLPLALLLHAARPDIQMTQTTSSLSASLGDRVTISCRASQDISKYLNWYQQKPDGTVKLLIYHTSRLHSGVPSRFSGSGSGTDYSLTISNLEQEDIATYFCQQGNTLPYTFGGGTKLEITGGGGSGGGGSGGGGSEVKLQESGPGLVAPSQSLSVTCTVSGVSLPDYGVSWIRQPPRKGLEWLGVIWGSETTYYNSALKSRLTIIKDNSKSQVFLKMNSLQTDDTAIYYCAKHYYYGGSYAMDYWGQGTSVTVSSTRTTTPAPRPPTPAPTIASQPLSLRPEACRPAAGGAVHTRGLDFACDIYIWAPLAGTCGVLLLSLVITLYCAVSLSKMLKKRSPLTTGVYVKMPPTEPECEKQFQPYFIPINSARVKFSRSADAPAYKQGQNQLYNELNLGRREEYDVLDKRRGRDPEMGGKPRRKNPQEGLYNELQKDKMAEAYSEIGMKGERRRGKGHDGLYQGLSTATKDTYDALHMQALPPR

SEQ ID NO: 1366 - protein, 522 aa, synthetic construct
  REGION 1..522: note = Description of Artificial Sequence: Synthetic chimeric antigen receptor
MALPVTALLLPLALLLHAARPEIVMTQSPATLSLSPGERATLSCRASQDISKYLNWYQQKPGQAPRLLIYHTSRLHSGIPARFSGSGSGTDYTLTISSLQPEDFAVYFCQQGNTLPYTFGQGTKLEIKGGGGSGGGGSGGGGSQVQLQESGPGLVKPSETLSLTCTVSGVSLPDYGVSWIRQPPGKGLEWIGVIWGSETTYYSSSLKSRVTISKDNSKNQVSLKLSSVTAADTAVYYCAKHYYYGGSYAMDYWGQGTLVTVSSTTTPAPRPPTPAPTIASQPLSLRPEACRPAAGGAVHTRGLDFACDIYIWAPLAGTCGVLLLSLVITLYCALYLLRRDQRLPPDAHKPPGGGSFRTPIQEEQADAHSTLAKIRSKRSRLLHSDYMNMTPRRPGPTRKHYQPYAPPRDFAAYRSGVQVETISPGDGRTFPKRGQTCVVHYTGMLEDGKKFDSSRDRNKPFKFMLGKQEVIRGWEEGVAQMSVGQRAKLTISPDYAYGATGHPGIIPPHATLVFDVELLKLE

SEQ ID NO: 1367 - protein, 508 aa, synthetic construct
  REGION 1..508: note = Description of Artificial Sequence: Synthetic chimeric antigen receptor
MALPVTALLLPLALLLHAARPEIVMTQSPATLSLSPGERATLSCRASQDISKYLNWYQQKPGQAPRLLIYHTSRLHSGIPARFSGSGSGTDYTLTISSLQPEDFAVYFCQQGNTLPYTFGQGTKLEIKGGGGSGGGGSGGGGSQVQLQESGPGLVKPSETLSLTCTVSGVSLPDYGVSWIRQPPGKGLEWIGVIWGSETTYYSSSLKSRVTISKDNSKNQVSLKLSSVTAADTAVYYCAKHYYYGGSYAMDYWGQGTLVTVSSTTTPAPRPPTPAPTIASQPLSLRPEACRPAAGGAVHTRGLDFACDIYIWAPLAGTCGVLLLSLVITLYCALYLLRRDQRLPPDAHKPPGGGSFRTPIQEEQADAHSTLAKIRSKRSRLLHSDYMNMTPRRPGPTRKHYQPYAPPRDFAAYRSILWHEMWHEGLIEASRLYFGERNVKGMFEVLEPLHAMMERGPQTLKETSFNQAYGRDLMEAQEWCRKYMKSGNVKDLLQAWDLYYHVFRRISK

SEQ ID NO: 1368 - protein, 528 aa, synthetic construct
  REGION 1..528: note = Description of Artificial Sequence: Synthetic chimeric antigen receptor
MALPVTALLLPLALLLHAARPEIVMTQSPATLSLSPGERATLSCRASQDISKYLNWYQQKPGQAPRLLIYHTSRLHSGIPARFSGSGSGTDYTLTISSLQPEDFAVYFCQQGNTLPYTFGQGTKLEIKGGGGSGGGGSGGGGSQVQLQESGPGLVKPSETLSLTCTVSGVSLPDYGVSWIRQPPGKGLEWIGVIWGSETTYYSSSLKSRVTISKDNSKNQVSLKLSSVTAADTAVYYCAKHYYYGGSYAMDYWGQGTLVTVSSTTTPAPRPPTPAPTIASQPLSLRPEACRPAAGGAVHTRGLDFACDIYIWAPLAGTCGVLLLSLVITLYCQRRKYRSNKGESPVEPAEPCHYSCPREEEGSTIPIQEDYRKPEPACSPRSKRSRLLHSDYMNMTPRRPGPTRKHYQPYAPPRDFAAYRSGVQVETISPGDGRTFPKRGQTCVVHYTGMLEDGKKFDSSRDRNKPFKFMLGKQEVIRGWEEGVAQMSVGQRAKLTISPDYAYGATGHPGIIPPHATLVFDVELLKLE

SEQ ID NO: 1369 - protein, 514 aa, synthetic construct
  REGION 1..514: note = Description of Artificial Sequence: Synthetic chimeric antigen receptor
MALPVTALLLPLALLLHAARPEIVMTQSPATLSLSPGERATLSCRASQDISKYLNWYQQKPGQAPRLLIYHTSRLHSGIPARFSGSGSGTDYTLTISSLQPEDFAVYFCQQGNTLPYTFGQGTKLEIKGGGGSGGGGSGGGGSQVQLQESGPGLVKPSETLSLTCTVSGVSLPDYGVSWIRQPPGKGLEWIGVIWGSETTYYSSSLKSRVTISKDNSKNQVSLKLSSVTAADTAVYYCAKHYYYGGSYAMDYWGQGTLVTVSSTTTPAPRPPTPAPTIASQPLSLRPEACRPAAGGAVHTRGLDFACDIYIWAPLAGTCGVLLLSLVITLYCQRRKYRSNKGESPVEPAEPCHYSCPREEEGSTIPIQEDYRKPEPACSPRSKRSRLLHSDYMNMTPRRPGPTRKHYQPYAPPRDFAAYRSILWHEMWHEGLIEASRLYFGERNVKGMFEVLEPLHAMMERGPQTLKETSFNQAYGRDLMEAQEWCRKYMKSGNVKDLLQAWDLYYHVFRRISK

SEQ ID NO: 1370 - protein, 522 aa, synthetic construct
  REGION 1..522: note = Description of Artificial Sequence: Synthetic chimeric antigen receptor
MALPVTALLLPLALLLHAARPEIVMTQSPATLSLSPGERATLSCRASQDISKYLNWYQQKPGQAPRLLIYHTSRLHSGIPARFSGSGSGTDYTLTISSLQPEDFAVYFCQQGNTLPYTFGQGTKLEIKGGGGSGGGGSGGGGSQVQLQESGPGLVKPSETLSLTCTVSGVSLPDYGVSWIRQPPGKGLEWIGVIWGSETTYYSSSLKSRVTISKDNSKNQVSLKLSSVTAADTAVYYCAKHYYYGGSYAMDYWGQGTLVTVSSTTTPAPRPPTPAPTIASQPLSLRPEACRPAAGGAVHTRGLDFACDIYIWAPLAGTCGVLLLSLVITLYCKRGRKKLLYIFKQPFMRPVQTTQEEDGCSCRFPEEEEGGCELRSKRSRLLHSDYMNMTPRRPGPTRKHYQPYAPPRDFAAYRSGVQVETISPGDGRTFPKRGQTCVVHYTGMLEDGKKFDSSRDRNKPFKFMLGKQEVIRGWEEGVAQMSVGQRAKLTISPDYAYGATGHPGIIPPHATLVFDVELLKLE

SEQ ID NO: 1371 - protein, 508 aa, synthetic construct
  REGION 1..508: note = Description of Artificial Sequence: Synthetic chimeric antigen receptor
MALPVTALLLPLALLLHAARPEIVMTQSPATLSLSPGERATLSCRASQDISKYLNWYQQKPGQAPRLLIYHTSRLHSGIPARFSGSGSGTDYTLTISSLQPEDFAVYFCQQGNTLPYTFGQGTKLEIKGGGGSGGGGSGGGGSQVQLQESGPGLVKPSETLSLTCTVSGVSLPDYGVSWIRQPPGKGLEWIGVIWGSETTYYSSSLKSRVTISKDNSKNQVSLKLSSVTAADTAVYYCAKHYYYGGSYAMDYWGQGTLVTVSSTTTPAPRPPTPAPTIASQPLSLRPEACRPAAGGAVHTRGLDFACDIYIWAPLAGTCGVLLLSLVITLYCKRGRKKLLYIFKQPFMRPVQTTQEEDGCSCRFPEEEEGGCELRSKRSRLLHSDYMNMTPRRPGPTRKHYQPYAPPRDFAAYRSILWHEMWHEGLIEASRLYFGERNVKGMFEVLEPLHAMMERGPQTLKETSFNQAYGRDLMEAQEWCRKYMKSGNVKDLLQAWDLYYHVFRRISK

SEQ ID NO: 1372 - protein, 495 aa, synthetic construct; identical to SEQ ID NO: 307
  REGION 1..495: note = Description of Artificial Sequence: Synthetic chimeric antigen receptor

SEQ ID NO: 1373 - protein, 495 aa, synthetic construct; identical to SEQ ID NO: 307
  REGION 1..495: note = Description of Artificial Sequence: Synthetic chimeric antigen receptor

SEQ ID NO: 1374 - protein, 495 aa, synthetic construct; identical to SEQ ID NO: 307
  REGION 1..495: note = Description of Artificial Sequence: Synthetic chimeric antigen receptor

SEQ ID NO: 1375 - protein, 495 aa, synthetic construct; identical to SEQ ID NO: 307
  REGION 1..495: note = Description of Artificial Sequence: Synthetic chimeric antigen receptor

SEQ ID NO: 1376 - protein, 495 aa, synthetic construct; identical to SEQ ID NO: 307
  REGION 1..495: note = Description of Artificial Sequence: Synthetic chimeric antigen receptor

SEQ ID NO: 1377 - protein, 495 aa, synthetic construct; identical to SEQ ID NO: 307
  REGION 1..495: note = Description of Artificial Sequence: Synthetic chimeric antigen receptor

SEQ ID NO: 1378 - protein, 495 aa, synthetic construct; identical to SEQ ID NO: 307
  REGION 1..495: note = Description of Artificial Sequence: Synthetic chimeric antigen receptor

SEQ ID NO: 1379 - protein, 495 aa, synthetic construct; identical to SEQ ID NO: 307
  REGION 1..495: note = Description of Artificial Sequence: Synthetic chimeric antigen receptor

SEQ ID NO: 1380 - protein, 251 aa, synthetic construct; identical to SEQ ID NO: 386
  REGION 1..251: note = Description of Artificial Sequence: Synthetic chimeric antigen receptor

SEQ ID NO: 1381 - protein, 495 aa, synthetic construct; identical to SEQ ID NO: 307
  REGION 1..495: note = Description of Artificial Sequence: Synthetic chimeric antigen receptor

SEQ ID NO: 1382 - protein, 495 aa, synthetic construct; identical to SEQ ID NO: 307
  REGION 1..495: note = Description of Artificial Sequence: Synthetic chimeric antigen receptor

SEQ ID NO: 1383 - protein, 495 aa, synthetic construct; identical to SEQ ID NO: 307
  REGION 1..495: note = Description of Artificial Sequence: Synthetic chimeric antigen receptor

SEQ ID NO: 1384 - protein, 495 aa, synthetic construct; identical to SEQ ID NO: 1359
  REGION 1..495: note = Description of Artificial Sequence: Synthetic chimeric antigen receptor

SEQ ID NO: 1385 - protein, 495 aa, synthetic construct; identical to SEQ ID NO: 307
  REGION 1..495: note = Description of Artificial Sequence: Synthetic chimeric antigen receptor

SEQ ID NO: 1386 - protein, 495 aa, synthetic construct; identical to SEQ ID NO: 1359
  REGION 1..495: note = Description of Artificial Sequence: Synthetic chimeric antigen receptor

SEQ ID NO: 1387 - protein, 495 aa, synthetic construct; identical to SEQ ID NO: 307
  REGION 1..495: note = Description of Artificial Sequence: Synthetic chimeric antigen receptor

SEQ ID NO: 1388 - protein, 495 aa, synthetic construct; identical to SEQ ID NO: 1359
  REGION 1..495: note = Description of Artificial Sequence: Synthetic chimeric antigen receptor

SEQ ID NO: 1389 - protein, 495 aa, synthetic construct; identical to SEQ ID NO: 307
  REGION 1..495: note = Description of Artificial Sequence: Synthetic chimeric antigen receptor

SEQ ID NO: 1390 - protein, 494 aa, synthetic construct
  REGION 1..494: note = Description of Artificial Sequence: Synthetic chimeric antigen receptor
METDTLLLWVLLLWVPGSTGDIQMTQTTSSLSASLGDRVTISCRASQDISKYLNWYQQKPDGTVKLLIYHTSRLHSGVPSRFSGSGSGTDYSLTISNLEQEDIATYFCQQGNTLPYTFGGGTKLEITKAGGGGSGGGGSGGGGSGGGGSEVKLQESGPGLVAPSQSLSVTCTVSGVSLPDYGVSWIRQPPRKGLEWLGVIWGSETTYYNSALKSRLTIIKDNSKSQVFLKMNSLQTDDTAIYYCAKHYYYGGSYAMDYWGQGTSVTVSSDPTTTPAPRPPTPAPTIASQPLSLRPEACRPAAGGAVHTRGLDFACDIYIWAPLAGTCGVLLLSLVITLYCKRGRKKLLYIFKQPFMRPVQTTQEEDGCSCRFPEEEEGGCELRVKFSRSADAPAYQQGQNQLYNELNLGRREEYDVLDKRRGRDPEMGGKPRRKNPQEGLYNELQKDKMAEAYSEIGMKGERRRGKGHDGLYQGLSTATKDTYDALHMQALPPR

SEQ ID NO: 1391 - protein, 494 aa, synthetic construct; identical to SEQ ID NO: 1390
  REGION 1..494: note = Description of Artificial Sequence: Synthetic chimeric antigen receptor

SEQ ID NO: 1392 - protein, 144 aa, synthetic construct
  REGION 1..144: note = Description of Artificial Sequence: Synthetic chimeric antigen receptor
MALPVTALLLPLALLLHAARPDIQMTQTTSSLSASLGDRVTISCRASQDISKYLNWYQQKPDGTVKLLIYHTSRLHSGVPSRFSGSGSGTDYSLTISNLEQEDIATYFCQQGNTLPYTFGGGTKLEITGGGGSGGGGSGGGGSE

SEQ ID NO: 1393 - protein, 486 aa, synthetic construct
  REGION 1..486: note = Description of Artificial Sequence: Synthetic chimeric antigen receptor
MALPVTALLLPLALLLHAARPEIVMTQSPATLSLSPGERATLSCRASQDISKYLNWYQQKPGQAPRLLIYHTSRLHSGIPARFSGSGSGTDYTLTISSLQPEDFAVYFCQQGNTLPYTFGQGTKLEIKGGGGSGGGGSGGGGSQVQLQESGPGLVKPSETLSLTCTVSGVSLPDYGVSWIRQPPGKGLEWIGVIWGSETTYYSSSLKSRVTISKDNSKNQVSLKLSSVTAADTAVYYCAKHYYYGGSYAMDYWGQGTLVTVSSTTTPAPRPPTPAPTIASQPLSLRPEACRPAAGGAVHTRGLDFACDIYIWAPLAGTCGVLLLSLVITLYCKRGRKKLLYIFKQPFMRPVQTTQEEDGCSCRFPEEEEGGCELRVKFSRSADAPAYKQGQNQLYNELNLGRREEYDVLDKRRGRDPEMGGKPRRKNPQEGLYNELQKDKMAEAYSEIGMKGERRRGKGHDGLYQGLSTATKDTYDALHMQALPPR

SEQ ID NO: 1394 - protein, 486 aa, synthetic construct
  REGION 1..486: note = Description of Artificial Sequence: Synthetic chimeric antigen receptor
MALPVTALLLPLALLLHAARPEIVMTQSPATLSLSPGERATLSCRASQDISKYLNWYQQKPGQAPRLLIYHTSRLHSGIPARFSGSGSGTDYTLTISSLQPEDFAVYFCQQGNTLPYTFGQGTKLEIKGGGGSGGGGSGGGGSQVQLQESGPGLVKPSETLSLTCTVSGVSLPDYGVSWIRQPPGKGLEWIGVIWGSETTYYQSSLKSRVTISKDNSKNQVSLKLSSVTAADTAVYYCAKHYYYGGSYAMDYWGQGTLVTVSSTTTPAPRPPTPAPTIASQPLSLRPEACRPAAGGAVHTRGLDFACDIYIWAPLAGTCGVLLLSLVITLYCKRGRKKLLYIFKQPFMRPVQTTQEEDGCSCRFPEEEEGGCELRVKFSRSADAPAYKQGQNQLYNELNLGRREEYDVLDKRRGRDPEMGGKPRRKNPQEGLYNELQKDKMAEAYSEIGMKGERRRGKGHDGLYQGLSTATKDTYDALHMQALPPR

SEQ ID NO: 1395 - protein, 486 aa, synthetic construct
  REGION 1..486: note = Description of Artificial Sequence: Synthetic chimeric antigen receptor
MALPVTALLLPLALLLHAARPQVQLQESGPGLVKPSETLSLTCTVSGVSLPDYGVSWIRQPPGKGLEWIGVIWGSETTYYSSSLKSRVTISKDNSKNQVSLKLSSVTAADTAVYYCAKHYYYGGSYAMDYWGQGTLVTVSSGGGGSGGGGSGGGGSEIVMTQSPATLSLSPGERATLSCRASQDISKYLNWYQQKPGQAPRLLIYHTSRLHSGIPARFSGSGSGTDYTLTISSLQPEDFAVYFCQQGNTLPYTFGQGTKLEIKTTTPAPRPPTPAPTIASQPLSLRPEACRPAAGGAVHTRGLDFACDIYIWAPLAGTCGVLLLSLVITLYCKRGRKKLLYIFKQPFMRPVQTTQEEDGCSCRFPEEEEGGCELRVKFSRSADAPAYKQGQNQLYNELNLGRREEYDVLDKRRGRDPEMGGKPRRKNPQEGLYNELQKDKMAEAYSEIGMKGERRRGKGHDGLYQGLSTATKDTYDALHMQALPPR

SEQ ID NO: 1396 - protein, 486 aa, synthetic construct
  REGION 1..486: note = Description of Artificial Sequence: Synthetic chimeric antigen receptor
MALPVTALLLPLALLLHAARPQVQLQESGPGLVKPSETLSLTCTVSGVSLPDYGVSWIRQPPGKGLEWIGVIWGSETTYYQSSLKSRVTISKDNSKNQVSLKLSSVTAADTAVYYCAKHYYYGGSYAMDYWGQGTLVTVSSGGGGSGGGGSGGGGSEIVMTQSPATLSLSPGERATLSCRASQDISKYLNWYQQKPGQAPRLLIYHTSRLHSGIPARFSGSGSGTDYTLTISSLQPEDFAVYFCQQGNTLPYTFGQGTKLEIKTTTPAPRPPTPAPTIASQPLSLRPEACRPAAGGAVHTRGLDFACDIYIWAPLAGTCGVLLLSLVITLYCKRGRKKLLYIFKQPFMRPVQTTQEEDGCSCRFPEEEEGGCELRVKFSRSADAPAYKQGQNQLYNELNLGRREEYDVLDKRRGRDPEMGGKPRRKNPQEGLYNELQKDKMAEAYSEIGMKGERRRGKGHDGLYQGLSTATKDTYDALHMQALPPR

SEQ ID NO: 1397 - protein, 491 aa, synthetic construct
  REGION 1..491: note = Description of Artificial Sequence: Synthetic chimeric antigen receptor
MALPVTALLLPLALLLHAARPEIVMTQSPATLSLSPGERATLSCRASQDISKYLNWYQQKPGQAPRLLIYHTSRLHSGIPARFSGSGSGTDYTLTISSLQPEDFAVYFCQQGNTLPYTFGQGTKLEIKGGGGSGGGGSGGGGSGGGGSQVQLQESGPGLVKPSETLSLTCTVSGVSLPDYGVSWIRQPPGKGLEWIGVIWGSETTYYSSSLKSRVTISKDNSKNQVSLKLSSVTAADTAVYYCAKHYYYGGSYAMDYWGQGTLVTVSSTTTPAPRPPTPAPTIASQPLSLRPEACRPAAGGAVHTRGLDFACDIYIWAPLAGTCGVLLLSLVITLYCKRGRKKLLYIFKQPFMRPVQTTQEEDGCSCRFPEEEEGGCELRVKFSRSADAPAYKQGQNQLYNELNLGRREEYDVLDKRRGRDPEMGGKPRRKNPQEGLYNELQKDKMAEAYSEIGMKGERRRGKGHDGLYQGLSTATKDTYDALHMQALPPR

SEQ ID NO: 1398 - protein, 491 aa, synthetic construct
  REGION 1..491: note = Description of Artificial Sequence: Synthetic chimeric antigen receptor
MALPVTALLLPLALLLHAARPEIVMTQSPATLSLSPGERATLSCRASQDISKYLNWYQQKPGQAPRLLIYHTSRLHSGIPARFSGSGSGTDYTLTISSLQPEDFAVYFCQQGNTLPYTFGQGTKLEIKGGGGSGGGGSGGGGSGGGGSQVQLQESGPGLVKPSETLSLTCTVSGVSLPDYGVSWIRQPPGKGLEWIGVIWGSETTYYQSSLKSRVTISKDNSKNQVSLKLSSVTAADTAVYYCAKHYYYGGSYAMDYWGQGTLVTVSSTTTPAPRPPTPAPTIASQPLSLRPEACRPAAGGAVHTRGLDFACDIYIWAPLAGTCGVLLLSLVITLYCKRGRKKLLYIFKQPFMRPVQTTQEEDGCSCRFPEEEEGGCELRVKFSRSADAPAYKQGQNQLYNELNLGRREEYDVLDKRRGRDPEMGGKPRRKNPQEGLYNELQKDKMAEAYSEIGMKGERRRGKGHDGLYQGLSTATKDTYDALHMQALPPR

SEQ ID NO: 1399 - protein, 491 aa, synthetic construct
  REGION 1..491: note = Description of Artificial Sequence: Synthetic chimeric antigen receptor
MALPVTALLLPLALLLHAARPQVQLQESGPGLVKPSETLSLTCTVSGVSLPDYGVSWIRQPPGKGLEWIGVIWGSETTYYSSSLKSRVTISKDNSKNQVSLKLSSVTAADTAVYYCAKHYYYGGSYAMDYWGQGTLVTVSSGGGGSGGGGSGGGGSGGGGSEIVMTQSPATLSLSPGERATLSCRASQDISKYLNWYQQKPGQAPRLLIYHTSRLHSGIPARFSGSGSGTDYTLTISSLQPEDFAVYFCQQGNTLPYTFGQGTKLEIKTTTPAPRPPTPAPTIASQPLSLRPEACRPAAGGAVHTRGLDFACDIYIWAPLAGTCGVLLLSLVITLYCKRGRKKLLYIFKQPFMRPVQTTQEEDGCSCRFPEEEEGGCELRVKFSRSADAPAYKQGQNQLYNELNLGRREEYDVLDKRRGRDPEMGGKPRRKNPQEGLYNELQKDKMAEAYSEIGMKGERRRGKGHDGLYQGLSTATKDTYDALHMQALPPR

SEQ ID NO: 1400 - protein, 491 aa, synthetic construct
  REGION 1..491: note = Description of Artificial Sequence: Synthetic chimeric antigen receptor
MALPVTALLLPLALLLHAARPQVQLQESGPGLVKPSETLSLTCTVSGVSLPDYGVSWIRQPPGKGLEWIGVIWGSETTYYQSSLKSRVTISKDNSKNQVSLKLSSVTAADTAVYYCAKHYYYGGSYAMDYWGQGTLVTVSSGGGGSGGGGSGGGGSGGGGSEIVMTQSPATLSLSPGERATLSCRASQDISKYLNWYQQKPGQAPRLLIYHTSRLHSGIPARFSGSGSGTDYTLTISSLQPEDFAVYFCQQGNTLPYTFGQGTKLEIKTTTPAPRPPTPAPTIASQPLSLRPEACRPAAGGAVHTRGLDFACDIYIWAPLAGTCGVLLLSLVITLYCKRGRKKLLYIFKQPFMRPVQTTQEEDGCSCRFPEEEEGGCELRVKFSRSADAPAYKQGQNQLYNELNLGRREEYDVLDKRRGRDPEMGGKPRRKNPQEGLYNELQKDKMAEAYSEIGMKGERRRGKGHDGLYQGLSTATKDTYDALHMQALPPR

SEQ ID NO: 1401 - protein, 491 aa, synthetic construct
  REGION 1..491: note = Description of Artificial Sequence: Synthetic chimeric antigen receptor
MALPVTALLLPLALLLHAARPEIVMTQSPATLSLSPGERATLSCRASQDISKYLNWYQQKPGQAPRLLIYHTSRLHSGIPARFSGSGSGTDYTLTISSLQPEDFAVYFCQQGNTLPYTFGQGTKLEIKGGGGSGGGGSGGGGSGGGGSQVQLQESGPGLVKPSETLSLTCTVSGVSLPDYGVSWIRQPPGKGLEWIGVIWGSETTYYNSSLKSRVTISKDNSKNQVSLKLSSVTAADTAVYYCAKHYYYGGSYAMDYWGQGTLVTVSSTTTPAPRPPTPAPTIASQPLSLRPEACRPAAGGAVHTRGLDFACDIYIWAPLAGTCGVLLLSLVITLYCKRGRKKLLYIFKQPFMRPVQTTQEEDGCSCRFPEEEEGGCELRVKFSRSADAPAYKQGQNQLYNELNLGRREEYDVLDKRRGRDPEMGGKPRRKNPQEGLYNELQKDKMAEAYSEIGMKGERRRGKGHDGLYQGLSTATKDTYDALHMQALPPR

SEQ ID NO: 1402 - protein, 491 aa, synthetic construct; identical to SEQ ID NO: 1401
  REGION 1..491: note = Description of Artificial Sequence: Synthetic chimeric antigen receptor

SEQ ID NO: 1403 - protein, 491 aa, synthetic construct
  REGION 1..491: note = Description of Artificial Sequence: Synthetic chimeric antigen receptor
MALPVTALLLPLALLLHAARPQVQLQESGPGLVKPSETLSLTCTVSGVSLPDYGVSWIRQPPGKGLEWIGVIWGSETTYYNSSLKSRVTISKDNSKNQVSLKLSSVTAADTAVYYCAKHYYYGGSYAMDYWGQGTLVTVSSGGGGSGGGGSGGGGSGGGGSEIVMTQSPATLSLSPGERATLSCRASQDISKYLNWYQQKPGQAPRLLIYHTSRLHSGIPARFSGSGSGTDYTLTISSLQPEDFAVYFCQQGNTLPYTFGQGTKLEIKTTTPAPRPPTPAPTIASQPLSLRPEACRPAAGGAVHTRGLDFACDIYIWAPLAGTCGVLLLSLVITLYCKRGRKKLLYIFKQPFMRPVQTTQEEDGCSCRFPEEEEGGCELRVKFSRSADAPAYKQGQNQLYNELNLGRREEYDVLDKRRGRDPEMGGKPRRKNPQEGLYNELQKDKMAEAYSEIGMKGERRRGKGHDGLYQGLSTATKDTYDALHMQALPPR

SEQ ID NO: 1404 - protein, 486 aa, synthetic construct
  REGION 1..486: note = Description of Artificial Sequence: Synthetic chimeric antigen receptor
MALPVTALLLPLALLLHAARPEIVMTQSPATLSLSPGERATLSCRASQDISKYLNWYQQKPGQAPRLLIYHTSRLHSGIPARFSGSGSGTDYTLTISSLQPEDFAVYFCQQGNTLPYTFGQGTKLEIKGGGGSGGGGSGGGGSQVQLQESGPGLVKPSETLSLTCTVSGVSLPDYGVSWIRQPPGKGLEWIGVIWGSETTYYNSSLKSRVTISKDNSKNQVSLKLSSVTAADTAVYYCAKHYYYGGSYAMDYWGQGTLVTVSSTTTPAPRPPTPAPTIASQPLSLRPEACRPAAGGAVHTRGLDFACDIYIWAPLAGTCGVLLLSLVITLYCKRGRKKLLYIFKQPFMRPVQTTQEEDGCSCRFPEEEEGGCELRVKFSRSADAPAYKQGQNQLYNELNLGRREEYDVLDKRRGRDPEMGGKPRRKNPQEGLYNELQKDKMAEAYSEIGMKGERRRGKGHDGLYQGLSTATKDTYDALHMQALPPR

SEQ ID NO: 1405 - protein, 486 aa, synthetic construct; identical to SEQ ID NO: 669
  REGION 1..486: note = Description of Artificial Sequence: Synthetic chimeric antigen receptor

SEQ ID NO: 1406 - protein, 495 aa, synthetic construct; identical to SEQ ID NO: 1359
  REGION 1..495: note = Description of Artificial Sequence: Synthetic chimeric antigen receptor

SEQ ID NO: 1407 - protein, 495 aa, synthetic construct; identical to SEQ ID NO: 307
  REGION 1..495: note = Description of Artificial Sequence: Synthetic chimeric antigen receptor

SEQ ID NO: 1408 - protein, 530 aa, synthetic construct
  REGION 1..530: note = Description of Artificial Sequence: Synthetic chimeric antigen receptor
MALPVTALLLPLALLLHAARPDIMMTQSPSSLAVSAGEKVTMTCKSSQSVLYSSNQKNYLAWYQQKPGQSPKLLIYWASTRESGVPDRFTGSGSGTDFTLTISSVQPEDLAVYYCHQYLSSHTFGGGTKLEIKRGGGGSGGGGSGGGGSQLQQPGAELVRPGSSVKLSCKASGYTFTRYWIHWVKQRPIQGLEWIGNIDPSDSETHYNQKFKDKATLTVDKSSGTAYMQLSSLTSEDSAVYYCATEDLYYAMEYWGQGTSVTVSSTTTPAPRPPTPAPTIASQPLSLRPEACRPAAGGAVHTRGLDFACDIYIWAPLAGTCGVLLLSLVITLYCRSKRSRLLHSDYMNMTPRRPGPTRKHYQPYAPPRDFAAYRSKRGRKKLLYIFKQPFMRPVQTTQEEDGCSCRFPEEEEGGCELRVKFSRSADAPAYQQGQNQLYNELNLGRREEYDVLDKRRGRDPEMGGKPQRRKNPQEGLYNELQKDKMAEAYSEIGMKGERRRGKGHDGLYQGLSTATKDTYDALHMQALPPR

SEQ ID NO: 1409 - protein, 486 aa, synthetic construct; identical to SEQ ID NO: 1394
  REGION 1..486: note = Description of Artificial Sequence: Synthetic chimeric antigen receptor

SEQ ID NO: 1410 - protein, 486 aa, synthetic construct; identical to SEQ ID NO: 1395
  REGION 1..486: note = Description of Artificial Sequence: Synthetic chimeric antigen receptor

SEQ ID NO: 1411 - protein, 486 aa, synthetic construct; identical to SEQ ID NO: 1396
  REGION 1..486: note = Description of Artificial Sequence: Synthetic chimeric antigen receptor

SEQ ID NO: 1412 - protein, 491 aa, synthetic construct; identical to SEQ ID NO: 1397
  REGION 1..491: note = Description of Artificial Sequence: Synthetic chimeric antigen receptor

SEQ ID NO: 1413 - protein, 491 aa, synthetic construct; identical to SEQ ID NO: 1398
  REGION 1..491: note = Description of Artificial Sequence: Synthetic chimeric antigen receptor

SEQ ID NO: 1414 - protein, 491 aa, synthetic construct; identical to SEQ ID NO: 1399
  REGION 1..491: note = Description of Artificial Sequence: Synthetic chimeric antigen receptor

SEQ ID NO: 1415 - protein, 491 aa, synthetic construct; identical to SEQ ID NO: 1400
  REGION 1..491: note = Description of Artificial Sequence: Synthetic chimeric antigen receptor

SEQ ID NO: 1416 - protein, 491 aa, synthetic construct; identical to SEQ ID NO: 1401
  REGION 1..491: note = Description of Artificial Sequence: Synthetic chimeric antigen receptor

SEQ ID NO: 1417 - protein, 491 aa, synthetic construct; identical to SEQ ID NO: 1401
  REGION 1..491: note = Description of Artificial Sequence: Synthetic chimeric antigen receptor

SEQ ID NO: 1418 - protein, 491 aa, synthetic construct; identical to SEQ ID NO: 1403
  REGION 1..491: note = Description of Artificial Sequence: Synthetic chimeric antigen receptor

SEQ ID NO: 1419 - protein, 486 aa, synthetic construct; identical to SEQ ID NO: 1404
  REGION 1..486: note = Description of Artificial Sequence: Synthetic chimeric antigen receptor

SEQ ID NO: 1420 - protein, 465 aa, synthetic construct
  REGION 1..465: note = Description of Artificial Sequence: Synthetic chimeric antigen receptor
MGTSLLCWMALCLLGADHADAQVQLQQSGPELVKPGASVKISCKASGYAFSSSWMNWVKQRPGKGLEWIGRIYPGDEDTNYSGKFKDKATLTADKSSTTAYMQLSSLTSEDSAVYFCARSLLYGDYLDYWGQGTTLTVSSGGGGSGGGGSGGGGSQIVLTQSPAIMSASPGEKVTMTCSASSSVSYMHWYQQKSGTSPKRWIYDTSKLASGVPDRFSGSGSGTSYFLTINNMEAEDAATYYCQQWNINPLTFGAGTKLELKRSDPAEPKSPDKTHTCPPCPKDPKFWVLVVVGGVLACYSLLVTVAFIIFWVRSKRSRLLHSDYMNMTPRRPGPTRKHYQPYAPPRDFAAYRSRVKFSRSADAPAYQQGQNQLYNELNLGRREEYDVLDKRRGRDPEMGGKPRRKNPQEGLYNELQKDKMAEAYSEIGMKGERRRGKGHDGLYQGLSTATKDTYDALHMQALPPR

SEQ ID NO: 1421 - protein, 681 aa, synthetic construct
  REGION 1..681: note = Description of Artificial Sequence: Synthetic chimeric antigen receptor
MGTSLLCWMALCLLGADHADAQVQLQQSGPELVKPGASVKISCKASGYAFSSSWMNWVKQRPGKGLEWIGRIYPGDEDTNYSGKFKDKATLTADKSSTTAYMQLSSLTSEDSAVYFCARSLLYGDYLDYWGQGTTLTVSSGGGGSGGGGSGGGGSQIVLTQSPAIMSASPGEKVTMTCSASSSVSYMHWYQQKSGTSPKRWIYDTSKLASGVPDRFSGSGSGTSYFLTINNMEAEDAATYYCQQWNINPLTFGAGTKLELKRSDPAEPKSPDKTHTCPPCPAPPVAGPSVFLFPPKPKDTLMIARTPEVTCVVVDVSHEDPEVKFNWYVDGVEVHNAKTKPREEQYNSTYRVVSVLTVLHQDWLNGKEYKCKVSNKALPAPIEKTISKAKGQPREPQVYTLPPSRDELTKNQVSLTCLVKGFYPSDIAVEWESNGQPENNYKTTPPVLDSDGSFFLYSKLTVDKSRWQQGNVFSCSVMHEALHNHYTQKSLSLSPGKKDPKFWVLVVVGGVLACYSLLVTVAFIIFWVRSKRSRLLHSDYMNMTPRRPGPTRKHYQPYAPPRDFAAYRSRVKFSRSADAPAYQQGQNQLYNELNLGRREEYDVLDKRRGRDPEMGGKPRRKNPQEGLYNELQKDKMAEAYSEIGMKGERRRGKGHDGLYQGLSTATKDTYDALHMQALPPR

SEQ ID NO: 1422 - protein, 838 aa, synthetic construct
  REGION 1..838: note = Description of Artificial Sequence: Synthetic chimeric antigen receptor
MLLLVTSLLLCELPHPAFLLIPQSVKESEGDLVTPAGNLTLTCTASGSDINDYPISWVRQAPGKGLEWIGFINSGGSTWYASWVKGRFTISRTSTTVDLKMTSLTTDDTATYFCARGYSTYYGDFNIWGPGTLVTISSGGGGSGGGGSGGGGSELVMTQTPSSTSGAVGGTVTINCQASQSIDSNLAWFQQKPGQPPTLLIYRASNLASGVPSRFSGSRSGTEYTLTISGVQREDAATYYCLGGVGNVSYRTSFGGGTEVVVKESKYGPPCPPCPMFWVLVVVGGVLACYSLLVTVAFIIFWVKRGRKKLLYIFKQPFMRPVQTTQEEDGCSCRFPEEEEGGCELRVKFSRSADAPAYQQGQNQLYNELNLGRREEYDVLDKRRGRDPEMGGKPRRKNPQEGLYNELQKDKMAEAYSEIGMKGERRRGKGHDGLYQGLSTATKDTYDALHMQALPPRLEGGGEGRGSLLTCGDVEENPGPRMLLLVTSLLLCELPHPAFLLIPRKVCNGIGIGEFKDSLSINATNIKHFKNCTSISGDLHILPVAFRGDSFTHTPPLDPQELDILKTVKEITGFLLIQAWPENRTDLHAFENLEIIRGRTKQHGQFSLAVVSLNITSLGLRSLKEISDGDVIISGNKNLCYANTINWKKLFGTSGQKTKIISNRGENSCKATGQVCHALCSPEGCWGPEPRDCVSCRNVSRGRECVDKCNLLEGEPREFVENSECIQCHPECLPQAMNITCTGRGPDNCIQCAHYIDGPHCVKTCPAGVMGENNTLVWKYADAGHVCHLCHPNCTYGCTGPGLEGCPTNGPKIPSIATGMVGALLLLLVVALGIGLFM

SEQ ID NO: 1423 - protein, 1055 aa, synthetic construct [sequence omitted]

SEQ ID NO: 1424 - protein, 945 aa, synthetic construct
  REGION 1..945: note = Description of Artificial Sequence: Synthetic chimeric antigen receptor
MLLLVTSLLLCELPHPAFLLIPQSVKESEGDLVTPAGNLTLTCTASGSDINDYPISWVRQAPGKGLEWIGFINSGGSTWYASWVKGRFTISRTSTTVDLKMTSLTTDDTATYFCARGYSTYYGDFNIWGPGTLVTISSGGGGSGGGGSGGGGSELVMTQTPSSTSGAVGGTVTINCQASQSIDSNLAWFQQKPGQPPTLLIYRASNLASGVPSRFSGSRSGTEYTLTISGVQREDAATYYCLGGVGNVSYRTSFGGGTEVVVKESKYGPPCPPCPGQPREPQVYTLPPSQEEMTKNQVSLTCLVKGFYPSDIAVEWESNGQPENNYKTTPPVLDSDGSFFLYSRLTVDKSRWQEGNVFSCSVMHEALHNHYTQKSLSLSLGKMFWVLVVVGGVLACYSLLVTVAFIIFWVKRGRKKLLYIFKQPFMRPVQTTQEEDGCSCRFPEEEEGGCELRVKFSRSADAPAYQQGQNQLYNELNLGRREEYDVLDKRRGRDPEMGGKPRRKNPQEGLYNELQKDKMAEAYSEIGMKGERRRGKGHDGLYQGLSTATKDTYDALHMQALPPRLEGGGEGRGSLLTCGDVEENPGPRMLLLVTSLLLCELPHPAFLLIPRKVCNGIGIGEFKDSLSINATNIKHFKNCTSISGDLHILPVAFRGDSFTHTPPLDPQELDILKTVKEITGFLLIQAWPENRTDLHAFENLEIIRGRTKQHGQFSLAVVSLNITSLGLRSLKEISDGDVIISGNKNLCYANTINWKKLFGTSGQKTKIISNRGENSCKATGQVCHALCSPEGCWGPEPRDCVSCRNVSRGRECVDKCNLLEGEPREFVENSECIQCHPECLPQAMNITCTGRGPDNCIQCAHYIDGPHCVKTCPAGVMGENNTLVWKYADAGHVCHLCHPNCTYGCTGPGLEGCPTNGPKIPSIATGMVGALLLLLVVALGIGLFM

SEQ ID NO: 1425 - protein, 845 aa, synthetic construct
  REGION 1..845: note = Description of Artificial Sequence: Synthetic chimeric antigen receptor
MLLLVTSLLLCELPHPAFLLIPQEQLVESGGRLVTPGGSLTLSCKASGFDFSAYYMSWVRQAPGKGLEWIATIYPSSGKTYYATWVNGRFTISSDNAQNTVDLQMNSLTAADRATYFCARDSYADDGALFNIWGPGTLVTISSGGGGSGGGGSGGGGSELVLTQSPSVSAALGSPAKITCTLSSAHKTDTIDWYQQLQGEAPRYLMQVQSDGSYTKRPGVPDRFSGSSSGADRYLIIPSVQADDEADYYCGADYIGGYVFGGGTQLTVTGESKYGPPCPPCPMFWVLVVVGGVLACYSLLVTVAFIIFWVKRGRKKLLYIFKQPFMRPVQTTQEEDGCSCRFPEEEEGGCELRVKFSRSADAPAYQQGQNQLYNELNLGRREEYDVLDKRRGRDPEMGGKPRRKNPQEGLYNELQKDKMAEAYSEIGMKGERRRGKGHDGLYQGLSTATKDTYDALHMQALPPRLEGGGEGRGSLLTCGDVEENPGPRMLLLVTSLLLCELPHPAFLLIPRKVCNGIGIGEFKDSLSINATNIKHFKNCTSISGDLHILPVAFRGDSFTHTPPLDPQELDILKTVKEITGFLLIQAWPENRTDLHAFENLEIIRGRTKQHGQFSLAVVSLNITSLGLRSLKEISDGDVIISGNKNLCYANTINWKKLFGTSGQKTKIISNRGENSCKATGQVCHALCSPEGCWGPEPRDCVSCRNVSRGRECVDKCNLLEGEPREFVENSECIQCHPECLPQAMNITCTGRGPDNCIQCAHYIDGPHCVKTCPAGVMGENNTLVWKYADAGHVCHLCHPNCTYGCTGPGLEGCPTNGPKIPSIATGMVGALLLLLVVALGIGLFM

SEQ ID NO: 1426 - protein, 952 aa, synthetic construct
  REGION 1..952: note = Description of Artificial Sequence: Synthetic chimeric antigen receptor
MLLLVTSLLLCELPHPAFLLIPQEQLVESGGRLVTPGGSLTLSCKASGFDFSAYYMSWVRQAPGKGLEWIATIYPSSGKTYYATWVNGRFTISSDNAQNTVDLQMNSLTAADRATYFCARDSYADDGALFNIWGPGTLVTISSGGGGSGGGGSGGGGSELVLTQSPSVSAALGSPAKITCTLSSAHKTDTIDWYQQLQGEAPRYLMQVQSDGSYTKRPGVPDRFSGSSSGADRYLIIPSVQADDEADYYCGADYIGGYVFGGGTQLTVTGESKYGPPCPPCPGQPREPQVYTLPPSQEEMTKNQVSLTCLVKGFYPSDIAVEWESNGQPENNYKTTPPVLDSDGSFFLYSRLTVDKSRWQEGNVFSCSVMHEALHNHYTQKSLSLSLGKMFWVLVVVGGVLACYSLLVTVAFIIFWVKRGRKKLLYIFKQPFMRPVQTTQEEDGCSCRFPEEEEGGCELRVKFSRSADAPAYQQGQNQLYNELNLGRREEYDVLDKRRGRDPEMGGKPRRKNPQEGLYNELQKDKMAEAYSEIGMKGERRRGKGHDGLYQGLSTATKDTYDALHMQALPPRLEGGGEGRGSLLTCGDVEENPGPRMLLLVTSLLLCELPHPAFLLIPRKVCNGIGIGEFKDSLSINATNIKHFKNCTSISGDLHILPVAFRGDSFTHTPPLDPQELDILKTVKEITGFLLIQAWPENRTDLHAFENLEIIRGRTKQHGQFSLAVVSLNITSLGLRSLKEISDGDVIISGNKNLCYANTINWKKLFGTSGQKTKIISNRGENSCKATGQVCHALCSPEGCWGPEPRDCVSCRNVSRGRECVDKCNLLEGEPREFVENSECIQCHPECLPQAMNITCTGRGPDNCIQCAHYIDGPHCVKTCPAGVMGENNTLVWKYADAGHVCHLCHPNCTYGCTGPGLEGCPTNGPKIPSIATGMVGALLLLLVVALGIGLFM

SEQ ID NO: 1427 - protein, 1062 aa, synthetic construct
  REGION 1..1062: note = Description of Artificial Sequence: Synthetic chimeric antigen receptor
MLLLVTSLLLCELPHPAFLLIPQEQLVESGGRLVTPGGSLTLSCKASGFDFSAYYMSWVRQAPGKGLEWIATIYPSSGKTYYATWVNGRFTISSDNAQNTVDLQMNSLTAADRATYFCARDSYADDGALFNIWGPGTLVTISSGGGGSGGGGSGGGGSELVLTQSPSVSAALGSPAKITCTLSSAHKTDTIDWYQQLQGEAPRYLMQVQSDGSYTKRPGVPDRFSGSSSGADRYLIIPSVQADDEADYYCGADYIGGYVFGGGTQLTVTGESKYGPPCPPCPAPEFLGGPSVFLFPPKPKDTLMISRTPEVTCVVVDVSQEDPEVQFNWYVDGVEVHNAKTKPREEQFNSTYRVVSVLTVLHQDWLNGKEYKCKVSNKGLPSSIEKTISKAKGQPREPQVYTLPPSQEEMTKNQVSLTCLVKGFYPSDIAVEWESNGQPENNYKTTPPVLDSDGSFFLYSRLTVDKSRWQEGNVFSCSVMHEALHNHYTQKSLSLSLGKMFWVLVVVGGVLACYSLLVTVAFIIFWVKRGRKKLLYIFKQPFMRPVQTTQEEDGCSCRFPEEEEGGCELRVKFSRSADAPAYQQGQNQLYNELNLGRREEYDVLDKRRGRDPEMGGKPRRKNPQEGLYNELQKDKMAEAYSEIGMKGERRRGKGHDGLYQGLSTATKDTYDALHMQALPPRLEGGGEGRGSLLTCGDVEENPGPRMLLLVTSLLLCELPHPAFLLIPRKVCNGIGIGEFKDSLSINATNIKHFKNCTSISGDLHILPVAFRGDSFTHTPPLDPQELDILKTVKEITGFLLIQAWPENRTDLHAFENLEIIRGRTKQHGQFSLAVVSLNITSLGLRSLKEISDGDVIISGNKNLCYANTINWKKLFGTSGQKTKIISNRGENSCKATGQVCHALCSPEGCWGPEPRDCVSCRNVSRGRECVDKCNLLEGEPREFVENSECIQCHPECLPQAMNITCTGRGPDNCIQCAHYIDGPHCVKTCPAGVMGENNTLVWKYADAGHVCHLCHPNCTYGCTGPGLEGCPTNGPKIPSIATGMVGALLLLLVVALGIGLFM

SEQ ID NO: 1428 - protein, 502 aa, synthetic construct
  REGION 1..502: note = Description of Artificial Sequence: Synthetic chimeric antigen receptor
MALPVTALLLPLALLLHAARPEIVLTQSPGTLSLSPGERATLSCRASQSVSSSYLAWYQQKPGQAPRLLIYGASSRATGIPDRFSGSGSGTDFTLTISRLEPEDFAVYYCQQYGSSRFTFGPGTKVDIKGSTSGSGKPGSGEGSTKGQVQLVQSGAEVKKPGSSVKVSCKDSGGTFSSYAISWVRQAPGQGLEWMGGIIPIFGTTNYAQQFQGRVTITADESTSTAYMELSSLRSEDTAVYYCAREAVAADWLDPWGQGTLVTVSSFVPVFLPAKPTTTPAPRPPTPAPTIASQPLSLRPEACRPAAGGAVHTRGLDFACDIYIWAPLAGTCGVLLLSLVITLYCNHRNRSKRSRLLHSDYMNMTPRRPGPTRKHYQPYAPPRDFAAYRSRVKFSRSADAPAYQQGQNQLYNELNLGRREEYDVLDKRRGRDPEMGGKPRRKNPQEGLYNELQKDKMAEAYSEIGMKGERRRGKGHDGLYQGLSTATKDTYDALHMQALPPR

SEQ ID NO: 1429 - protein, 508 aa, synthetic construct
  REGION 1..508: note = Description of Artificial Sequence: Synthetic chimeric antigen receptor
MALPVTALLLPLALLLHAARPEIVLTQSPGTLSLSPGERATLSCRASQSVSSSYLAWYQQKPGQAPRLLIYGASSRATGIPDRFSGSGSGTDFTLTISRLEPEDFAVYYCQQYGSSRFTFGPGTKVDIKGSTSGSGKPGSGEGSTKGQVQLVQSGAEVKKPGSSVKVSCKDSGGTFSSYAISWVRQAPGQGLEWMGGIIPIFGTTNYAQQFQGRVTITADESTSTAYMELSSLRSEDTAVYYCAREAVAADWLDPWGQGTLVTVSSFVPVFLPAKPTTTPAPRPPTPAPTIASQPLSLRPEACRPAAGGAVHTRGLDFACDIYIWAPLAGTCGVLLLSLVITLYCNHRNRFSVVKRGRKKLLYIFKQPFMRPVQTTQEEDGCSCRFPEEEEGGCELRVKFSRSADAPAYQQGQNQLYNELNLGRREEYDVLDKRRGRDPEMGGKPRRKNPQEGLYNELQKDKMAEAYSEIGMKGERRRGKGHDGLYQGLSTATKDTYDALHMQALPPR

SEQ ID NO: 1430 - protein, 509 aa, synthetic construct
  REGION 1..509: note = Description of Artificial Sequence: Synthetic chimeric antigen receptor
MALPVTALLLPLALLLHAARPEIVLTQSPGTLSLSPGERATLSCRASQSVSSSYLAWYQQKPGQAPRLLIYGASSRATGIPDRFSGSGSGTDFTLTISRLEPEDFAVYYCQQYGSSRFTFGPGTKVDIKGSTSGSGKPGSGEGSTKGQVQLVQSGAEVKKPGSSVKVSCKDSGGTFSSYAISWVRQAPGQGLEWMGGIIPIFGTTNYAQQFQGRVTITADESTSTAYMELSSLRSEDTAVYYCAREAVAADWLDPWGQGTLVTVSSFVPVFLPAKPTTTPAPRPPTPAPTIASQPLSLRPEACRPAAGGAVHTRGLDFACDIYIWAPLAGTCGVLLLSLVITLYCNHRNQRRKYRSNKGESPVEPAEPCRYSCPREEEGSTIPIQEDYRKPEPACSPRVKFSRSADAPAYQQGQNQLYNELNLGRREEYDVLDKRRGRDPEMGGKPRRKNPQEGLYNELQKDKMAEAYSEIGMKGERRRGKGHDGLYQGLSTATKDTYDALHMQALPPR

SEQ ID NO: 1431 - protein, 550 aa, synthetic construct
  REGION 1..550: note = Description of Artificial Sequence: Synthetic chimeric antigen receptor
MALPVTALLLPLALLLHAARPEIVLTQSPGTLSLSPGERATLSCRASQSVSSSYLAWYQQKPGQAPRLLIYGASSRATGIPDRFSGSGSGTDFTLTISRLEPEDFAVYYCQQYGSSRFTFGPGTKVDIKGSTSGSGKPGSGEGSTKGQVQLVQSGAEVKKPGSSVKVSCKDSGGTFSSYAISWVRQAPGQGLEWMGGIIPIFGTTNYAQQFQGRVTITADESTSTAYMELSSLRSEDTAVYYCAREAVAADWLDPWGQGTLVTVSSFVPVFLPAKPTTTPAPRPPTPAPTIASQPLSLRPEACRPAAGGAVHTRGLDFACDIYIWAPLAGTCGVLLLSLVITLYCNHRNRSKRSRLLHSDYMNMTPRRPGPTRKHYQPYAPPRDFAAYRSQRRKYRSNKGESPVEPAEPCRYSCPREEEGSTIPIQEDYRKPEPACSPRVKFSRSADAPAYQQGQNQLYNELNLGRREEYDVLDKRRGRDPEMGGKPRRKNPQEGLYNELQKDKMAEAYSEIGMKGERRRGKGHDGLYQGLSTATKDTYDALHMQALPPR

SEQ ID NO: 1432 - protein, 556 aa, synthetic construct
  REGION 1..556: note = Description of Artificial Sequence: Synthetic chimeric antigen receptor
MALPVTALLLPLALLLHAARPEIVLTQSPGTLSLSPGERATLSCRASQSVSSSYLAWYQQKPGQAPRLLIYGASSRATGIPDRFSGSGSGTDFTLTISRLEPEDFAVYYCQQYGSSRFTFGPGTKVDIKGSTSGSGKPGSGEGSTKGQVQLVQSGAEVKKPGSSVKVSCKDSGGTFSSYAISWVRQAPGQGLEWMGGIIPIFGTTNYAQQFQGRVTITADESTSTAYMELSSLRSEDTAVYYCAREAVAADWLDPWGQGTLVTVSSFVPVFLPAKPTTTPAPRPPTPAPTIASQPLSLRPEACRPAAGGAVHTRGLDFACDIYIWAPLAGTCGVLLLSLVITLYCNHRNQRRKYRSNKGESPVEPAEPCRYSCPREEEGSTIPIQEDYRKPEPACSPRFSVVKRGRKKLLYIFKQPFMRPVQTTQEEDGCSCRFPEEEEGGCELRVKFSRSADAPAYQQGQNQLYNELNLGRREEYDVLDKRRGRDPEMGGKPRRKNPQEGLYNELQKDKMAEAYSEIGMKGERRRGKGHDGLYQGLSTATKDTYDALHMQALPPR

SEQ ID NO: 1433 - protein, 506 aa, synthetic construct
  REGION 1..506: note = Description of Artificial Sequence: Synthetic chimeric antigen receptor
MLLLVTSLLLCELPHPAFLLIPDIQMTQTTSSLSASLGDRVTISCRASQDISKYLNWYQQKPDGTVKLLIYHTSRLHSGVPSRFSGSGSGTDYSLTISNLEQEDIATYFCQQGNTLPYTFGGGTKLEITGSTSGSGKPGSGEGSTKGEVKLQESGPGLVAPSQSLSVTCTVSGVSLPDYGVSWIRQPPRKGLEWLGVIWGSETTYYNSALKSRLTIIKDNSKSQVFLKMNSLQTDDTAIYYCAKHYYYGGSYAMDYWGQGTSVTVSSAAAFVPVFLPAKPTTTPAPRPPTPAPTIASQPLSLRPEACRPAAGGAVHTRGLDFACDIYIWAPLAGTCGVLLLSLVITLYCNHRNRSKRSRLLHSDYMNMTPRRPGPTRKHYQPYAPPRDFAAYRSRVKFSRSADAPAYQQGQNQLYNELNLGRREEYDVLDKRRGRDPEMGGKPRRKNPQEGLYNELQKDKMAEAYSEIGMKGERRRGKGHDGLYQGLSTATKDTYDALHMQALPPR

SEQ ID NO: 1434 - protein, 560 aa, synthetic construct
  REGION 1..560: note = Description of Artificial Sequence: Synthetic chimeric antigen receptor
MLLLVTSLLLCELPHPAFLLIPDIQMTQTTSSLSASLGDRVTISCRASQDISKYLNWYQQKPDGTVKLLIYHTSRLHSGVPSRFSGSGSGTDYSLTISNLEQEDIATYFCQQGNTLPYTFGGGTKLEITGSTSGSGKPGSGEGSTKGEVKLQESGPGLVAPSQSLSVTCTVSGVSLPDYGVSWIRQPPRKGLEWLGVIWGSETTYYNSALKSRLTIIKDNSKSQVFLKMNSLQTDDTAIYYCAKHYYYGGSYAMDYWGQGTSVTVSSAAAFVPVFLPAKPTTTPAPRPPTPAPTIASQPLSLRPEACRPAAGGAVHTRGLDFACDIYIWAPLAGTCGVLLLSLVITLYCNHRNQRRKYRSNKGESPVEPAEPCRYSCPREEEGSTIPIQEDYRKPEPACSPRFSVVKRGRKKLLYIFKQPFMRPVQTTQEEDGCSCRFPEEEEGGCELRVKFSRSADAPAYQQGQNQLYNELNLGRREEYDVLDKRRGRDPEMGGKPRRKNPQEGLYNELQKDKMAEAYSEIGMKGERRRGKGHDGLYQGLSTATKDTYDALHMQALPPR

SEQ ID NO: 1435 - protein, 513 aa, synthetic construct
  REGION 1..513: note = Description of Artificial Sequence: Synthetic chimeric antigen receptor
MLLLVTSLLLCELPHPAFLLIPDIQMTQTTSSLSASLGDRVTISCRASQDISKYLNWYQQKPDGTVKLLIYHTSRLHSGVPSRFSGSGSGTDYSLTISNLEQEDIATYFCQQGNTLPYTFGGGTKLEITGSTSGSGKPGSGEGSTKGEVKLQESGPGLVAPSQSLSVTCTVSGVSLPDYGVSWIRQPPRKGLEWLGVIWGSETTYYNSALKSRLTIIKDNSKSQVFLKMNSLQTDDTAIYYCAKHYYYGGSYAMDYWGQGTSVTVSSAAAFVPVFLPAKPTTTPAPRPPTPAPTIASQPLSLRPEACRPAAGGAVHTRGLDFACDIYIWAPLAGTCGVLLLSLVITLYCNHRNQRRKYRSNKGESPVEPAEPCRYSCPREEEGSTIPIQEDYRKPEPACSPRVKFSRSADAPAYQQGQNQLYNELNLGRREEYDVLDKRRGRDPEMGGKPRRKNPQEGLYNELQKDKMAEAYSEIGMKGERRRGKGHDGLYQGLSTATKDTYDALHMQALPPR

SEQ ID NO: 1436 - protein, 554 aa, synthetic construct
  REGION 1..554: note = Description of Artificial Sequence: Synthetic chimeric antigen receptor
MLLLVTSLLLCELPHPAFLLIPDIQMTQTTSSLSASLGDRVTISCRASQDISKYLNWYQQKPDGTVKLLIYHTSRLHSGVPSRFSGSGSGTDYSLTISNLEQEDIATYFCQQGNTLPYTFGGGTKLEITGSTSGSGKPGSGEGSTKGEVKLQESGPGLVAPSQSLSVTCTVSGVSLPDYGVSWIRQPPRKGLEWLGVIWGSETTYYNSALKSRLTIIKDNSKSQVFLKMNSLQTDDTAIYYCAKHYYYGGSYAMDYWGQGTSVTVSSAAAFVPVFLPAKPTTTPAPRPPTPAPTIASQPLSLRPEACRPAAGGAVHTRGLDFACDIYIWAPLAGTCGVLLLSLVITLYCNHRNRSKRSRLLHSDYMNMTPRRPGPTRKHYQPYAPPRDFAAYRSQRRKYRSNKGESPVEPAEPCRYSCPREEEGSTIPIQEDYRKPEPACSPRVKFSRSADAPAYQQGQNQLYNELNLGRREEYDVLDKRRGRDPEMGGKPRRKNPQEGLYNELQKDKMAEAYSEIGMKGERRRGKGHDGLYQGLSTATKDTYDALHMQALPPR

SEQ ID NO: 1437 - protein, 476 aa, synthetic construct
  REGION 1..476: note = Description of Artificial Sequence: Synthetic chimeric antigen receptor
MALPVTALLLPLALLLHAARPEIVLTQSPGTLSLSPGERATLSCRASQSVSSSYLAWYQQKPGQAPRLLIYGASSRATGIPDRFSGSGSGTDFTLTISRLEPEDFAVYYCQQYGSSRFTFGPGTKVDIKGSTSGSGKPGSGEGSTKGQVQLVQSGAEVKKPGSSVKVSCKDSGGTFSSYAISWVRQAPGQGLEWMGGIIPIFGTTNYAQQFQGRVTITADESTSTAYMELSSLRSEDTAVYYCAREAVAADWLDPWGQGTLVTVSSFVPVFLPAKPTTTPAPRPPTPAPTIASQPLSLRPEACRPAAGGAVHTRGLDFACDIYIWAPLAGTCGVLLLSLVITLYCNHRNRSKRSRLLHSDYMNMTPRRPGPTRKHYQPYAPPRDFAAYRSQRRKYRSNKGESPVEPAEPCRYSCPREEEGSTIPIQEDYRKPEPACSPQVRKAAITSYEKSDGVYTGLSTRNQETYETLKHEKPPQ

SEQ ID NO: 1438 - protein, 480 aa, synthetic construct
  REGION 1..480: note = Description of Artificial Sequence: Synthetic chimeric antigen receptor
MLLLVTSLLLCELPHPAFLLIPDIQMTQTTSSLSASLGDRVTISCRASQDISKYLNWYQQKPDGTVKLLIYHTSRLHSGVPSRFSGSGSGTDYSLTISNLEQEDIATYFCQQGNTLPYTFGGGTKLEITGSTSGSGKPGSGEGSTKGEVKLQESGPGLVAPSQSLSVTCTVSGVSLPDYGVSWIRQPPRKGLEWLGVIWGSETTYYNSALKSRLTIIKDNSKSQVFLKMNSLQTDDTAIYYCAKHYYYGGSYAMDYWGQGTSVTVSSAAAFVPVFLPAKPTTTPAPRPPTPAPTIASQPLSLRPEACRPAAGGAVHTRGLDFACDIYIWAPLAGTCGVLLLSLVITLYCNHRNRSKRSRLLHSDYMNMTPRRPGPTRKHYQPYAPPRDFAAYRSQRRKYRSNKGESPVEPAEPCRYSCPREEEGSTIPIQEDYRKPEPACSPQVRKAAITSYEKSDGVYTGLSTRNQETYETLKHEKPPQ

SEQ ID NO: 1439 - protein, 428 aa, synthetic construct
  REGION 1..428: note = Description of Artificial Sequence: Synthetic chimeric antigen receptor
MALPVTALLLPLALLLHAARPEIVLTQSPGTLSLSPGERATLSCRASQSVSSSYLAWYQQKPGQAPRLLIYGASSRATGIPDRFSGSGSGTDFTLTISRLEPEDFAVYYCQQYGSSRFTFGPGTKVDIKGSTSGSGKPGSGEGSTKGQVQLVQSGAEVKKPGSSVKVSCKDSGGTFSSYAISWVRQAPGQGLEWMGGIIPIFGTTNYAQQFQGRVTITADESTSTAYMELSSLRSEDTAVYYCAREAVAADWLDPWGQGTLVTVSSFVPVFLPAKPTTTPAPRPPTPAPTIASQPLSLRPEACRPAAGGAVHTRGLDFACDIYIWAPLAGTCGVLLLSLVITLYCNHRNRSKRSRLLHSDYMNMTPRRPGPTRKHYQPYAPPRDFAAYRSQVRKAAITSYEKSDGVYTGLSTRNQETYETLKHEKPPQ

SEQ ID NO: 1440 - protein, 432 aa, synthetic construct
  REGION 1..432: note = Description of Artificial Sequence: Synthetic chimeric antigen receptor
MLLLVTSLLLCELPHPAFLLIPDIQMTQTTSSLSASLGDRVTISCRASQDISKYLNWYQQKPDGTVKLLIYHTSRLHSGVPSRFSGSGSGTDYSLTISNLEQEDIATYFCQQGNTLPYTFGGGTKLEITGSTSGSGKPGSGEGSTKGEVKLQESGPGLVAPSQSLSVTCTVSGVSLPDYGVSWIRQPPRKGLEWLGVIWGSETTYYNSALKSRLTIIKDNSKSQVFLKMNSLQTDDTAIYYCAKHYYYGGSYAMDYWGQGTSVTVSSAAAFVPVFLPAKPTTTPAPRPPTPAPTIASQPLSLRPEACRPAAGGAVHTRGLDFACDIYIWAPLAGTCGVLLLSLVITLYCNHRNRSKRSRLLHSDYMNMTPRRPGPTRKHYQPYAPPRDFAAYRSQVRKAAITSYEKSDGVYTGLSTRNQETYETLKHEKPPQ

SEQ ID NO: 1441 - protein, 486 aa, synthetic construct; identical to SEQ ID NO: 1393
  REGION 1..486: note = Description of Artificial Sequence: Synthetic chimeric antigen receptor

SEQ ID NO: 1442 - protein, 486 aa, synthetic construct; identical to SEQ ID NO: 1394
  REGION 1..486: note = Description of Artificial Sequence: Synthetic chimeric antigen receptor

SEQ ID NO: 1443 - protein, 486 aa, synthetic construct; identical to SEQ ID NO: 1395
  REGION 1..486: note = Description of Artificial Sequence: Synthetic chimeric antigen receptor

SEQ ID NO: 1444 - protein, 486 aa, synthetic construct; identical to SEQ ID NO: 1396
  REGION 1..486: note = Description of Artificial Sequence: Synthetic chimeric antigen receptor

SEQ ID NO: 1445 - protein, 491 aa, synthetic construct; identical to SEQ ID NO: 1397
  REGION 1..491: note = Description of Artificial Sequence: Synthetic chimeric antigen receptor

SEQ ID NO: 1446 - protein, 491 aa, synthetic construct; identical to SEQ ID NO: 1398
  REGION 1..491: note = Description of Artificial Sequence: Synthetic chimeric antigen receptor

SEQ ID NO: 1447 - protein, 491 aa, synthetic construct; identical to SEQ ID NO: 1399
  REGION 1..491: note = Description of Artificial Sequence: Synthetic chimeric antigen receptor

SEQ ID NO: 1448 - protein, 491 aa, synthetic construct; identical to SEQ ID NO: 1400
  REGION 1..491: note = Description of Artificial Sequence: Synthetic chimeric antigen receptor

SEQ ID NO: 1449 - protein, 491 aa, synthetic construct; identical to SEQ ID NO: 1401
  REGION 1..491: note = Description of Artificial Sequence: Synthetic chimeric antigen receptor

SEQ ID NO: 1450 - protein, 491 aa, synthetic construct; identical to SEQ ID NO: 1401
  REGION 1..491: note = Description of Artificial Sequence: Synthetic chimeric antigen receptor

SEQ ID NO: 1451 - protein, 491 aa, synthetic construct; identical to SEQ ID NO: 1403
  REGION 1..491: note = Description of Artificial Sequence: Synthetic chimeric antigen receptor

SEQ ID NO: 1452 - protein, 486 aa, synthetic construct; identical to SEQ ID NO: 1404
  REGION 1..486: note = Description of Artificial Sequence: Synthetic chimeric antigen receptor

SEQ ID NO: 1453 - protein, 486 aa, synthetic construct; identical to SEQ ID NO: 669
  REGION 1..486: note = Description of Artificial Sequence: Synthetic chimeric antigen receptor

SEQ ID NO: 1454 - protein, 486 aa, synthetic construct; identical to SEQ ID NO: 1393
  REGION 1..486: note = Description of Artificial Sequence: Synthetic chimeric antigen receptor

SEQ ID NO: 1455 - protein, 486 aa, synthetic construct; identical to SEQ ID NO: 1394
  REGION 1..486: note = Description of Artificial Sequence: Synthetic chimeric antigen receptor

SEQ ID NO: 1456 - protein, 486 aa, synthetic construct; identical to SEQ ID NO: 1395
  REGION 1..486: note = Description of Artificial Sequence: Synthetic chimeric antigen receptor

SEQ ID NO: 1457 - protein, 486 aa, synthetic construct; identical to SEQ ID NO: 1396
  REGION 1..486: note = Description of Artificial Sequence: Synthetic chimeric antigen receptor

SEQ ID NO: 1458 - protein, 491 aa, synthetic construct; identical to SEQ ID NO: 1397
  REGION 1..491: note = Description of Artificial Sequence: Synthetic chimeric antigen receptor

SEQ ID NO: 1459 - protein, 491 aa, synthetic construct; identical to SEQ ID NO: 1398
  REGION 1..491: note = Description of Artificial Sequence: Synthetic chimeric antigen receptor

SEQ ID NO: 1460 - protein, 491 aa, synthetic construct; identical to SEQ ID NO: 1399
  REGION 1..491: note = Description of Artificial Sequence: Synthetic chimeric antigen receptor

SEQ ID NO: 1461 - protein, 491 aa, synthetic construct; identical to SEQ ID NO: 1400
  REGION 1..491: note = Description of Artificial Sequence: Synthetic chimeric antigen receptor

SEQ ID NO: 1462 - protein, 491 aa, synthetic construct; identical to SEQ ID NO: 1401
  REGION 1..491: note = Description of Artificial Sequence: Synthetic chimeric antigen receptor

SEQ ID NO: 1463 - protein, 491 aa, synthetic construct; identical to SEQ ID NO: 1401
  REGION 1..491: note = Description of Artificial Sequence: Synthetic chimeric antigen receptor

SEQ ID NO: 1464 - protein, 491 aa, synthetic construct; identical to SEQ ID NO: 1403
  REGION 1..491: note = Description of Artificial Sequence: Synthetic chimeric antigen receptor

SEQ ID NO: 1465 - protein, 486 aa, synthetic construct; identical to SEQ ID NO: 1404
  REGION 1..486: note = Description of Artificial Sequence: Synthetic chimeric antigen receptor

SEQ ID NO: 1466 - protein, 527 aa, synthetic construct
  REGION 1..527: note = Description of Artificial Sequence: Synthetic chimeric antigen receptor
DIQMTQTTSSLSASLGDRVTISCRASQDISKYLNWYQQKPDGTVKLLIYHTSRLHSGVPSRFSGSGSGTDYSLTISNLEQEDIATYFCQQGNTLPYTFGGGTKLEITGSTSGSGKPGSGEGSTKGEVKLQESGPGLVAPSQSLSVTCTVSGVSLPDYGVSWIRQPPRKGLEWLGVRWGSETTYYNSALKSRLTIIKDNSKSQVFLKMNSLQTDDTAIYYCAKHYYYGGSYAMDYWGQGTSVTVSSAAIEVMYPPPYLDNEKSNGTIIHVKGKHLCPSPLFPGPSKPFWVLVVVGGVLACYSLLVTVAFIIFWVRSKRSRLLHSDYMNMTPRRPGPTRKHYQPYAPPRDFAAYRSASGGGGSGGGGSKSRQTPPLASVEMEAMEALPVTWGTSSRDEDLENCSHHLGGGGSGGGGSRVKFSRSADAPAYQQGQNQLYNELNLGRREEYDVLDKRRGRDPEMGGKPRRKNPQEGLYNELQKDKMAEAYSEIGMKGERRRGKGHDGLYQGLSTATKDTYDALHMQALPPR

SEQ ID NO: 1467 - protein, 527 aa, synthetic construct
  REGION 1..527: note = Description of Artificial Sequence: Synthetic chimeric antigen receptor
MGTSLLCWMALCLLGADHADAQVQLQQSGPELVKPGASVKISCKASGYAFSSSWMNWVKQRPGKGLEWIGRIYPGDEDTNYSGKFKDKATLTADKSSTTAYMQLSSLTSEDSAVYFCARSLLYGDYLDYWGQGTTLTVSSGGGGSGGGGSGGGGSQIVLTQSPAIMSASPGEKVTMTCSASSSVSYMHWYQQKSGTSPKRWIYDTSKLASGVPDRFSGSGSGTSYFLTINNMEAEDAATYYCQQWNINPLTFGAGTKLELKRSDPTTTPAPRPPTPAPTIASQPLSLRPEACRPAAGGAVHTRGLDFACDIFWVLVVVGGVLACYSLLVTVAFIIFWVRSKRSRLLHSDYMNMTPRRPGPTRKHYQPYAPPRDFAAYRSRDQRLPPDAHKPPGGGSFRTPIQEEQADAHSTLAKIRVKFSRSADAPAYQQGQNQLYNELNLGRREEYDVLDKRRGRDPEMGGKPRRKNPQEGLYNELQKDKMAEAYSEIGMKGERRRGKGHDGLYQGLSTATKDTYDALHMQALPPR

SEQ ID NO: 1468 - protein, 222 aa, synthetic construct; identical to SEQ ID NO: 454
  REGION 1..222: note = Description of Artificial Sequence: Synthetic Chimeric Antigen Receptor

SEQ ID NO: 1469 - protein, 226 aa, synthetic construct; identical to SEQ ID NO: 559
  REGION 1..226: note = Description of Artificial Sequence: Synthetic Chimeric Antigen Receptor

SEQ ID NO: 1470 - protein, 286 aa, synthetic construct; identical to SEQ ID NO: 558
  REGION 1..286: note = Description of Artificial Sequence: Synthetic Chimeric Antigen Receptor

SEQ ID NO: 1471 - protein, 726 aa, synthetic construct
  REGION 1..726: note = Description of Artificial Sequence: Synthetic Chimeric Antigen Receptor
LLVTSLLLCELPHPAFLLIPDTDVKLQESGPGLVAPSQSLSITCTVSGFSLTSYAVSWVRQPPGKGLEWLGIIWSGGATNYNSALKSRLSISKDNSKSQVFLKMNGLQTDDTARYYCAREHYYGSSAMDYWGQGASITVSSGGGGSGGGGSGGGGSGIVMTQSPLSLPVSLGDQASISCRSSQSIVHSYGNTYLFWYLQKPGQSPKLLIYRVSNRFSGVPDRFSGSGSGTNFTLKISRVEAEDMGVYYCFQGTHVPYTFGGGTKLEIKEPKSCDKTHTCPPCPAPELLGGPSVFLFPPKPKDTLMISRTPEVTCVVVDVSHEDPEVKFNWYVDGVEVHNAKTKPREEQYNSTYRVVSVLTVLHQDWLNGKEYKCKVSNKALPAPIEKTISKAKGQPREPQVYTLPPSRDELTKNQVSLTCLVKGFYPSDIAVEWESNGQPENNYKTTPPVLDSDGSFFLYSKLTVDKSRWQQGNVFSCSVMHEALHNHYTQKSLSLSPGKKDPKAAAIEVMYPPPYLDNEKSNGTIIHVKGKHLCPSPLFPGPSKPFWVLVVVGGVLACYSLLVTVAFIIFWVRSKRSRLLHSDYMNMTPRRPGPTRKHYQPYAPPRDFAAYRSRVKFSRSADAPAYQQGQNQLYNELNLGRREEYDVLDKRRGRDPEMGGKPRRKNPQEGLYNELQKDKMAEAYSEIGMKGERRRGKGHDGLYQGLSTATKDTYDALHMQALPPR

SEQ ID NO: 1472 - protein, 490 aa, synthetic construct
  REGION 1..490: note = Description of Artificial Sequence: Synthetic Chimeric Antigen Receptor
LLVTSLLLCELPHPAFLLIPDTDVKLQESGPGLVAPSQSLSITCTVSGFSLTSYAVSWVRQPPGKGLEWLGIIWSGGATNYNSALKSRLSISKDNSKSQVFLKMNGLQTDDTARYYCAREHYYGSSAMDYWGQGASITVSSGGGGSGGGGSGGGGSGIVMTQSPLSLPVSLGDQASISCRSSQSIVHSYGNTYLFWYLQKPGQSPKLLIYRVSNRFSGVPDRFSGSGSGTNFTLKISRVEAEDMGVYYCFQGTHVPYTFGGGTKLEIKAAAIEVMYPPPYLDNEKSNGTIIHVKGKHLCPSPLFPGPSKPFWVLVVVGGVLACYSLLVTVAFIIFWVRSKRSRLLHSDYMNMTPRRPGPTRKHYQPYAPPRDFAAYRSRVKFSRSADAPAYQQGQNQLYNELNLGRREEYDVLDKRRGRDPEMGGKPRRKNPQEGLYNELQKDKMAEAYSEIGMKGERRRGKGHDGLYQGLSTATKDTYDALHMQALPPR

SEQ ID NO: 1473 - protein, 730 aa, synthetic construct
  REGION 1..730: note = Description of Artificial Sequence: Synthetic Chimeric Antigen Receptor
LLVTSLLLCELPHPAFLLIPDTDVKLQESGPGLVAPSQSLSITCTVSGFSLTSYAVSWVRQPPGKGLEWLGIIWSGGATNYNSALKSRLSISKDNSKSQVFLKMNGLQTDDTARYYCAREHYYGSSAMDYWGQGASITVSSGGGGSGGGGSGGGGSGIVMTQSPLSLPVSLGDQASISCRSSQSIVHSYGNTYLFWYLQKPGQSPKLLIYRVSNRFSGVPDRFSGSGSGTNFTLKISRVEAEDMGVYYCFQGTHVPYTFGGGTKLEIKEPKSCDKTHTCPPCPAPELLGGPSVFLFPPKPKDTLMISRTPEVTCVVVDVSHEDPEVKFNWYVDGVEVHNAKTKPREEQYNSTYRVVSVLTVLHQDWLNGKEYKCKVSNKALPAPIEKTISKAKGQPREPQVYTLPPSRDELTKNQVSLTCLVKGFYPSDIAVEWESNGQPENNYKTTPPVLDSDGSFFLYSKLTVDKSRWQQGNVFSCSVMHEALHNHYTQKSLSLSPGKKDPKAAATTTPAPRPPTPAPTIASQPLSLRPEACRPAAGGAVHTRGLDFACDIYIWAPLAGTCGVLLLSLVITLYCKRGRKKLLYIFKQPFMRPVQTTQEEDGCSCRFPEEEEGGCELRVKFSRSADAPAYKQGQNQLYNELNLGRREEYDVLDKRRGRDPEMGGKPRRKNPQEGLYNELQKDKMAEAYSEIGMKGERRRGKGHDGLYQGLSTATKDTYDALHMQALPPR

SEQ ID NO: 1474 - protein, 494 aa, synthetic construct
  REGION 1..494: note = Description of Artificial Sequence: Synthetic Chimeric Antigen Receptor
LLVTSLLLCELPHPAFLLIPDTDVKLQESGPGLVAPSQSLSITCTVSGFSLTSYAVSWVRQPPGKGLEWLGIIWSGGATNYNSALKSRLSISKDNSKSQVFLKMNGLQTDDTARYYCAREHYYGSSAMDYWGQGASITVSSGGGGSGGGGSGGGGSGIVMTQSPLSLPVSLGDQASISCRSSQSIVHSYGNTYLFWYLQKPGQSPKLLIYRVSNRFSGVPDRFSGSGSGTNFTLKISRVEAEDMGVYYCFQGTHVPYTFGGGTKLEIKAAATTTPAPRPPTPAPTIASQPLSLRPEACRPAAGGAVHTRGLDFACDIYIWAPLAGTCGVLLLSLVITLYCKRGRKKLLYIFKQPFMRPVQTTQEEDGCSCRFPEEEEGGCELRVKFSRSADAPAYKQGQNQLYNELNLGRREEYDVLDKRRGRDPEMGGKPRRKNPQEGLYNELQKDKMAEAYSEIGMKGERRRGKGHDGLYQGLSTATKDTYDALHMQALPPR

SEQ ID NO: 1475 - protein, 790 aa, synthetic construct
  REGION 1..790: note = Description of Artificial Sequence: Synthetic Chimeric Antigen Receptor
LLVTSLLLCELPHPAFLLIPDTDVKLQESGPGLVAPSQSLSITCTVSGFSLTSYAVSWVRQPPGKGLEWLGIIWSGGATNYNSALKSRLSISKDNSKSQVFLKMNGLQTDDTARYYCAREHYYGSSAMDYWGQGASITVSSGGGGSGGGGSGGGGSGIVMTQSPLSLPVSLGDQASISCRSSQSIVHSYGNTYLFWYLQKPGQSPKLLIYRVSNRFSGVPDRFSGSGSGTNFTLKISRVEAEDMGVYYCFQGTHVPYTFGGGTKLEIKEPKSCDKTHTCPPCPAPELLGGPSVFLFPPKPKDTLMISRTPEVTCVVVDVSHEDPEVKFNWYVDGVEVHNAKTKPREEQYNSTYRVVSVLTVLHQDWLNGKEYKCKVSNKALPAPIEKTISKAKGQPREPQVYTLPPSRDELTKNQVSLTCLVKGFYPSDIAVEWESNGQPENNYKTTPPVLDSDGSFFLYSKLTVDKSRWQQGNVFSCSVMHEALHNHYTQKSLSLSPGKKDPKAAAFVPVFLPAKPTTTPAPRPPTPAPTIASQPLSLRPEACRPAAGGAVHTRGLDFACDIYIWAPLAGTCGVLLLSLVITLYCNHRNRSKRSRLLHSDYMNMTPRRPGPTRKHYQPYAPPRDFAAYRSRFSVVKRGRKKLLYIFKQPFMRPVQTTQEEDGCSCRFPEEEEGGCELRVKFSRSADAPAYQQGQNQLYNELNLGRREEYDVLDKRRGRDPEMGGKPRRKNPQEGLYNELQKDKMAEAYSEIGMKGERRRGKGHDGLYQGLSTATKDTYDALHMQALPPR

SEQ ID NO: 1476 - protein, 554 aa, synthetic construct
  REGION 1..554: note = Description of Artificial Sequence: Synthetic Chimeric Antigen Receptor
LLVTSLLLCELPHPAFLLIPDTDVKLQESGPGLVAPSQSLSITCTVSGFSLTSYAVSWVRQPPGKGLEWLGIIWSGGATNYNSALKSRLSISKDNSKSQVFLKMNGLQTDDTARYYCAREHYYGSSAMDYWGQGASITVSSGGGGSGGGGSGGGGSGIVMTQSPLSLPVSLGDQASISCRSSQSIVHSYGNTYLFWYLQKPGQSPKLLIYRVSNRFSGVPDRFSGSGSGTNFTLKISRVEAEDMGVYYCFQGTHVPYTFGGGTKLEIKAAAFVPVFLPAKPTTTPAPRPPTPAPTIASQPLSLRPEACRPAAGGAVHTRGLDFACDIYIWAPLAGTCGVLLLSLVITLYCNHRNRSKRSRLLHSDYMNMTPRRPGPTRKHYQPYAPPRDFAAYRSRFSVVKRGRKKLLYIFKQPFMRPVQTTQEEDGCSCRFPEEEEGGCELRVKFSRSADAPAYQQGQNQLYNELNLGRREEYDVLDKRRGRDPEMGGKPRRKNPQEGLYNELQKDKMAEAYSEIGMKGERRRGKGHDGLYQGLSTATKDTYDALHMQALPPR

SEQ ID NO: 1477 - protein, 728 aa, synthetic construct
  REGION 1..728: note = Description of Artificial Sequence: Synthetic Chimeric Antigen Receptor
LLVTSLLLCELPHPAFLLIPDTQVQLQQSGAELVKPGASVKISCKASGYAFSSYWMNWVKQRPGKGLEWIGQIYPGDGDTTYNGKFKGKATLTADKSSSTVYMQLNSLTSEDSAVYFCVRYYYGSSGYFDYWGQGTTLTVSSGGGGSGGGGSGGGGSDVQMIQTPDSLAVSLGQRATISCRASESVDNYGISFMHWYQQKPGQSPKLLIYRASNLESGIPARFSGSGSRTDFTLTINPVETDDVATYYCQQNNKDPPTFGGGTKLEIKRAEPKSCDKTHTCPPCPAPELLGGPSVFLFPPKPKDTLMISRTPEVTCVVVDVSHEDPEVKFNWYVDGVEVHNAKTKPREEQYNSTYRVVSVLTVLHQDWLNGKEYKCKVSNKALPAPIEKTISKAKGQPREPQVYTLPPSRDELTKNQVSLTCLVKGFYPSDIAVEWESNGQPENNYKTTPPVLDSDGSFFLYSKLTVDKSRWQQGNVFSCSVMHEALHNHYTQKSLSLSPGKKDPKAAAIEVMYPPPYLDNEKSNGTIIHVKGKHLCPSPLFPGPSKPFWVLVVVGGVLACYSLLVTVAFIIFWVRSKRSRLLHSDYMNMTPRRPGPTRKHYQPYAPPRDFAAYRSRVKFSRSADAPAYQQGQNQLYNELNLGRREEYDVLDKRRGRDPEMGGKPRRKNPQEGLYNELQKDKMAEAYSEIGMKGERRRGKGHDGLYQGLSTATKDTYDALHMQALPPR

SEQ ID NO: 1478 - protein, 491 aa, synthetic construct
  REGION 1..491: note = Description of Artificial Sequence: Synthetic Chimeric Antigen Receptor
LLVTSLLLCELPHPAFLLIPDTQVQLQQSGAELVKPGASVKISCKASGYAFSSYWMNWVKQRPGKGLEWIGQIYPGDGDTTYNGKFKGKATLTADKSSSTVYMQLNSLTSEDSAVYFCVRYYYGSSGYFDYWGQGTTLTVSSGGGGSGGGGSGGGGSDVQMIQTPDSLAVSLGQRATISCRASESVDNYGISFMHWYQQKPGQSPKLLIYRASNLESGIPARFSGSGSRTDFTLTINPVETDDVATYYCQQNNKDPPTFGGGTKLEIKRAAAIEVMYPPPYLDNEKSNGTIIHVKGKHLCPSPLFPGPSKPFWVLVVVGGVLACYSLLVTVAFIIFWVRSKRSRLLHSDYMNMTPRRPGPTRKHYQPYAPPRDFAAYRSRVKFSRSADAPAYQQGQNQLYNELNLGRREEYDVLDKRRGRDPEMGGKPRRKNPQEGLYNELQKDKMAEAYSEIGMKGERRRGKGHDGLYQGLSTATKDTYDALHMQALPPR

SEQ ID NO: 1479 - protein, 732 aa, synthetic construct
  REGION 1..732: note = Description of Artificial Sequence: Synthetic Chimeric Antigen Receptor
LLVTSLLLCELPHPAFLLIPDTQVQLQQSGAELVKPGASVKISCKASGYAFSSYWMNWVKQRPGKGLEWIGQIYPGDGDTTYNGKFKGKATLTADKSSSTVYMQLNSLTSEDSAVYFCVRYYYGSSGYFDYWGQGTTLTVSSGGGGSGGGGSGGGGSDVQMIQTPDSLAVSLGQRATISCRASESVDNYGISFMHWYQQKPGQSPKLLIYRASNLESGIPARFSGSGSRTDFTLTINPVETDDVATYYCQQNNKDPPTFGGGTKLEIKRAEPKSCDKTHTCPPCPAPELLGGPSVFLFPPKPKDTLMISRTPEVTCVVVDVSHEDPEVKFNWYVDGVEVHNAKTKPREEQYNSTYRVVSVLTVLHQDWLNGKEYKCKVSNKALPAPIEKTISKAKGQPREPQVYTLPPSRDELTKNQVSLTCLVKGFYPSDIAVEWESNGQPENNYKTTPPVLDSDGSFFLYSKLTVDKSRWQQGNVFSCSVMHEALHNHYTQKSLSLSPGKKDPKAAATTTPAPRPPTPAPTIASQPLSLRPEACRPAAGGAVHTRGLDFACDIYIWAPLAGTCGVLLLSLVITLYCKRGRKKLLYIFKQPFMRPVQTTQEEDGCSCRFPEEEEGGCELRVKFSRSADAPAYKQGQNQLYNELNLGRREEYDVLDKRRGRDPEMGGKPRRKNPQEGLYNELQKDKMAEAYSEIGMKGERRRGKGHDGLYQGLSTATKDTYDALHMQALPPR

SEQ ID NO: 1480 - protein, 495 aa, synthetic construct
  REGION 1..495: note = Description of Artificial Sequence: Synthetic Chimeric Antigen Receptor
LLVTSLLLCELPHPAFLLIPDTQVQLQQSGAELVKPGASVKISCKASGYAFSSYWMNWVKQRPGKGLEWIGQIYPGDGDTTYNGKFKGKATLTADKSSSTVYMQLNSLTSEDSAVYFCVRYYYGSSGYFDYWGQGTTLTVSSGGGGSGGGGSGGGGSDVQMIQTPDSLAVSLGQRATISCRASESVDNYGISFMHWYQQKPGQSPKLLIYRASNLESGIPARFSGSGSRTDFTLTINPVETDDVATYYCQQNNKDPPTFGGGTKLEIKRAAATTTPAPRPPTPAPTIASQPLSLRPEACRPAAGGAVHTRGLDFACDIYIWAPLAGTCGVLLLSLVITLYCKRGRKKLLYIFKQPFMRPVQTTQEEDGCSCRFPEEEEGGCELRVKFSRSADAPAYKQGQNQLYNELNLGRREEYDVLDKRRGRDPEMGGKPRRKNPQEGLYNELQKDKMAEAYSEIGMKGERRRGKGHDGLYQGLSTATKDTYDALHMQALPPR

SEQ ID NO: 1481 - protein, 792 aa, synthetic construct
  REGION 1..792: note = Description of Artificial Sequence: Synthetic Chimeric Antigen Receptor
LLVTSLLLCELPHPAFLLIPDTQVQLQQSGAELVKPGASVKISCKASGYAFSSYWMNWVKQRPGKGLEWIGQIYPGDGDTTYNGKFKGKATLTADKSSSTVYMQLNSLTSEDSAVYFCVRYYYGSSGYFDYWGQGTTLTVSSGGGGSGGGGSGGGGSDVQMIQTPDSLAVSLGQRATISCRASESVDNYGISFMHWYQQKPGQSPKLLIYRASNLESGIPARFSGSGSRTDFTLTINPVETDDVATYYCQQNNKDPPTFGGGTKLEIKRAEPKSCDKTHTCPPCPAPELLGGPSVFLFPPKPKDTLMISRTPEVTCVVVDVSHEDPEVKFNWYVDGVEVHNAKTKPREEQYNSTYRVVSVLTVLHQDWLNGKEYKCKVSNKALPAPIEKTISKAKGQPREPQVYTLPPSRDELTKNQVSLTCLVKGFYPSDIAVEWESNGQPENNYKTTPPVLDSDGSFFLYSKLTVDKSRWQQGNVFSCSVMHEALHNHYTQKSLSLSPGKKDPKAAAFVPVFLPAKPTTTPAPRPPTPAPTIASQPLSLRPEACRPAAGGAVHTRGLDFACDIYIWAPLAGTCGVLLLSLVITLYCNHRNRSKRSRLLHSDYMNMTPRRPGPTRKHYQPYAPPRDFAAYRSRFSVVKRGRKKLLYIFKQPFMRPVQTTQEEDGCSCRFPEEEEGGCELRVKFSRSADAPAYQQGQNQLYNELNLGRREEYDVLDKRRGRDPEMGGKPRRKNPQEGLYNELQKDKMAEAYSEIGMKGERRRGKGHDGLYQGLSTATKDTYDALHMQALPPR

SEQ ID NO: 1482 - protein, 555 aa, synthetic construct
  REGION 1..555: note = Description of Artificial Sequence: Synthetic Chimeric Antigen Receptor
LLVTSLLLCELPHPAFLLIPDTQVQLQQSGAELVKPGASVKISCKASGYAFSSYWMNWVKQRPGKGLEWIGQIYPGDGDTTYNGKFKGKATLTADKSSSTVYMQLNSLTSEDSAVYFCVRYYYGSSGYFDYWGQGTTLTVSSGGGGSGGGGSGGGGSDVQMIQTPDSLAVSLGQRATISCRASESVDNYGISFMHWYQQKPGQSPKLLIYRASNLESGIPARFSGSGSRTDFTLTINPVETDDVATYYCQQNNKDPPTFGGGTKLEIKRAAAFVPVFLPAKPTTTPAPRPPTPAPTIASQPLSLRPEACRPAAGGAVHTRGLDFACDIYIWAPLAGTCGVLLLSLVITLYCNHRNRSKRSRLLHSDYMNMTPRRPGPTRKHYQPYAPPRDFAAYRSRFSVVKRGRKKLLYIFKQPFMRPVQTTQEEDGCSCRFPEEEEGGCELRVKFSRSADAPAYQQGQNQLYNELNLGRREEYDVLDKRRGRDPEMGGKPRRKNPQEGLYNELQKDKMAEAYSEIGMKGERRRGKGHDGLYQGLSTATKDTYDALHMQALPPR

SEQ ID NO: 1483 - protein, 725 aa, synthetic construct
  REGION 1..725: note = Description of Artificial Sequence: Synthetic Chimeric Antigen Receptor
LLVTSLLLCELPHPAFLLIPDTDVQLQESGPVLVKTGASVKMSCTASGYTFTDHFMDWVKQSHGKSLEWIGSLNPYSGGTSYNQKFKGKATLTVDKSSSTAYMELNSLTSVDSAVYYCARHNWGAYFDYWGQGTTLTVSSGGGGSGGGGSGGGGSDIVMTQAAPSVPVTPGESVSISCRSSKSLLHSNGNTYLYWFLQRPGQSPQRLIYYMSNLASGVPDRFSGRGSGTDFTLRISRVEAEDVGVYYCMQGLEDPYTFGGGTKLEIKEPKSCDKTHTCPPCPAPELLGGPSVFLFPPKPKDTLMISRTPEVTCVVVDVSHEDPEVKFNWYVDGVEVHNAKTKPREEQYNSTYRVVSVLTVLHQDWLNGKEYKCKVSNKALPAPIEKTISKAKGQPREPQVYTLPPSRDELTKNQVSLTCLVKGFYPSDIAVEWESNGQPENNYKTTPPVLDSDGSFFLYSKLTVDKSRWQQGNVFSCSVMHEALHNHYTQKSLSLSPGKKDPKAAAIEVMYPPPYLDNEKSNGTIIHVKGKHLCPSPLFPGPSKPFWVLVVVGGVLACYSLLVTVAFIIFWVRSKRSRLLHSDYMNMTPRRPGPTRKHYQPYAPPRDFAAYRSRVKFSRSADAPAYQQGQNQLYNELNLGRREEYDVLDKRRGRDPEMGGKPRRKNPQEGLYNELQKDKMAEAYSEIGMKGERRRGKGHDGLYQGLSTATKDTYDALHMQALPPR

SEQ ID NO: 1484 - protein, 489 aa, synthetic construct
  REGION 1..489: note = Description of Artificial Sequence: Synthetic Chimeric Antigen Receptor
LLVTSLLLCELPHPAFLLIPDTDVQLQESGPVLVKTGASVKMSCTASGYTFTDHFMDWVKQSHGKSLEWIGSLNPYSGGTSYNQKFKGKATLTVDKSSSTAYMELNSLTSVDSAVYYCARHNWGAYFDYWGQGTTLTVSSGGGGSGGGGSGGGGSDIVMTQAAPSVPVTPGESVSISCRSSKSLLHSNGNTYLYWFLQRPGQSPQRLIYYMSNLASGVPDRFSGRGSGTDFTLRISRVEAEDVGVYYCMQGLEDPYTFGGGTKLEIKAAAIEVMYPPPYLDNEKSNGTIIHVKGKHLCPSPLFPGPSKPFWVLVVVGGVLACYSLLVTVAFIIFWVRSKRSRLLHSDYMNMTPRRPGPTRKHYQPYAPPRDFAAYRSRVKFSRSADAPAYQQGQNQLYNELNLGRREEYDVLDKRRGRDPEMGGKPRRKNPQEGLYNELQKDKMAEAYSEIGMKGERRRGKGHDGLYQGLSTATKDTYDALHMQALPPR

SEQ ID NO: 1485 - protein, 729 aa, synthetic construct
  REGION 1..729: note = Description of Artificial Sequence: Synthetic Chimeric Antigen Receptor
LLVTSLLLCELPHPAFLLIPDTDVQLQESGPVLVKTGASVKMSCTASGYTFTDHFMDWVKQSHGKSLEWIGSLNPYSGGTSYNQKFKGKATLTVDKSSSTAYMELNSLTSVDSAVYYCARHNWGAYFDYWGQGTTLTVSSGGGGSGGGGSGGGGSDIVMTQAAPSVPVTPGESVSISCRSSKSLLHSNGNTYLYWFLQRPGQSPQRLIYYMSNLASGVPDRFSGRGSGTDFTLRISRVEAEDVGVYYCMQGLEDPYTFGGGTKLEIKEPKSCDKTHTCPPCPAPELLGGPSVFLFPPKPKDTLMISRTPEVTCVVVDVSHEDPEVKFNWYVDGVEVHNAKTKPREEQYNSTYRVVSVLTVLHQDWLNGKEYKCKVSNKALPAPIEKTISKAKGQPREPQVYTLPPSRDELTKNQVSLTCLVKGFYPSDIAVEWESNGQPENNYKTTPPVLDSDGSFFLYSKLTVDKSRWQQGNVFSCSVMHEALHNHYTQKSLSLSPGKKDPKAAATTTPAPRPPTPAPTIASQPLSLRPEACRPAAGGAVHTRGLDFACDIYIWAPLAGTCGVLLLSLVITLYCKRGRKKLLYIFKQPFMRPVQTTQEEDGCSCRFPEEEEGGCELRVKFSRSADAPAYKQGQNQLYNELNLGRREEYDVLDKRRGRDPEMGGKPRRKNPQEGLYNELQKDKMAEAYSEIGMKGERRRGKGHDGLYQGLSTATKDTYDALHMQALPPR

SEQ ID NO: 1486 - protein, 493 aa, synthetic construct
  REGION 1..493: note = Description of Artificial Sequence: Synthetic Chimeric Antigen Receptor
LLVTSLLLCELPHPAFLLIPDTDVQLQESGPVLVKTGASVKMSCTASGYTFTDHFMDWVKQSHGKSLEWIGSLNPYSGGTSYNQKFKGKATLTVDKSSSTAYMELNSLTSVDSAVYYCARHNWGAYFDYWGQGTTLTVSSGGGGSGGGGSGGGGSDIVMTQAAPSVPVTPGESVSISCRSSKSLLHSNGNTYLYWFLQRPGQSPQRLIYYMSNLASGVPDRFSGRGSGTDFTLRISRVEAEDVGVYYCMQGLEDPYTFGGGTKLEIKAAATTTPAPRPPTPAPTIASQPLSLRPEACRPAAGGAVHTRGLDFACDIYIWAPLAGTCGVLLLSLVITLYCKRGRKKLLYIFKQPFMRPVQTTQEEDGCSCRFPEEEEGGCELRVKFSRSADAPAYKQGQNQLYNELNLGRREEYDVLDKRRGRDPEMGGKPRRKNPQEGLYNELQKDKMAEAYSEIGMKGERRRGKGHDGLYQGLSTATKDTYDALHMQALPPR

SEQ ID NO: 1487 - protein, 789 aa, synthetic construct [sequence omitted]

SEQ ID NO: 1488 - protein, 553 aa, synthetic construct
  REGION 1..553: note = Description of Artificial Sequence: Synthetic Chimeric Antigen Receptor
LLVTSLLLCELPHPAFLLIPDTDVQLQESGPVLVKTGASVKMSCTASGYTFTDHFMDWVKQSHGKSLEWIGSLNPYSGGTSYNQKFKGKATLTVDKSSSTAYMELNSLTSVDSAVYYCARHNWGAYFDYWGQGTTLTVSSGGGGSGGGGSGGGGSDIVMTQAAPSVPVTPGESVSISCRSSKSLLHSNGNTYLYWFLQRPGQSPQRLIYYMSNLASGVPDRFSGRGSGTDFTLRISRVEAEDVGVYYCMQGLEDPYTFGGGTKLEIKAAAFVPVFLPAKPTTTPAPRPPTPAPTIASQPLSLRPEACRPAAGGAVHTRGLDFACDIYIWAPLAGTCGVLLLSLVITLYCNHRNRSKRSRLLHSDYMNMTPRRPGPTRKHYQPYAPPRDFAAYRSRFSVVKRGRKKLLYIFKQPFMRPVQTTQEEDGCSCRFPEEEEGGCELRVKFSRSADAPAYQQGQNQLYNELNLGRREEYDVLDKRRGRDPEMGGKPRRKNPQEGLYNELQKDKMAEAYSEIGMKGERRRGKGHDGLYQGLSTATKDTYDALHMQALPPR

SEQ ID NO: 1489 - protein, 724 aa, synthetic construct
  REGION 1..724: note = Description of Artificial Sequence: Synthetic Chimeric Antigen Receptor
LLVTSLLLCELPHPAFLLIPDTALQLQQSGAELVRPGASVTLSCKASGYTFTDYEMHWVKQTPVHGLEWIGAIDPETGGTAYNQKFEGKAILTADKSSSTAYMELRSLTSEDSPVYYCARRRYYGSSSFDYWGQGTTLTVSSGGGGSGGGGSGGGGSDVQMIQTPSSLSASLGDRVTISCRASQDIGNYLNWYQQKPDGTVKLLIYYTSRLHSGVPSRFSGSGSGTEYSLTISNLEQEDIATYFCQQGSALPPTFGGGTKLEINRAEPKSCDKTHTCPPCPAPELLGGPSVFLFPPKPKDTLMISRTPEVTCVVVDVSHEDPEVKFNWYVDGVEVHNAKTKPREEQYNSTYRVVSVLTVLHQDWLNGKEYKCKVSNKALPAPIEKTISKAKGQPREPQVYTLPPSRDELTKNQVSLTCLVKGFYPSDIAVEWESNGQPENNYKTTPPVLDSDGSFFLYSKLTVDKSRWQQGNVFSCSVMHEALHNHYTQKSLSLSPGKKDPKAAAIEVMYPPPYLDNEKSNGTIIHVKGKHLCPSPLFPGPSKPFWVLVVVGGVLACYSLLVTVAFIIFWVRSKRSRLLHSDYMNMTPRRPGPTRKHYQPYAPPRDFAAYRSRVKFSRSADAPAYQQGQNQLYNELNLGRREEYDVLDKRRGRDPEMGGKPRRKNPQEGLYNELQKDKMAEAYSEIGMKGERRRGKGHDGLYQGLSTATKDTYDALHMQALPPR

SEQ ID NO: 1490 - protein, 487 aa, synthetic construct
  REGION 1..487: note = Description of Artificial Sequence: Synthetic Chimeric Antigen Receptor
LLVTSLLLCELPHPAFLLIPDTALQLQQSGAELVRPGASVTLSCKASGYTFTDYEMHWVKQTPVHGLEWIGAIDPETGGTAYNQKFEGKAILTADKSSSTAYMELRSLTSEDSPVYYCARRRYYGSSSFDYWGQGTTLTVSSGGGGSGGGGSGGGGSDVQMIQTPSSLSASLGDRVTISCRASQDIGNYLNWYQQKPDGTVKLLIYYTSRLHSGVPSRFSGSGSGTEYSLTISNLEQEDIATYFCQQGSALPPTFGGGTKLEINRAAAIEVMYPPPYLDNEKSNGTIIHVKGKHLCPSPLFPGPSKPFWVLVVVGGVLACYSLLVTVAFIIFWVRSKRSRLLHSDYMNMTPRRPGPTRKHYQPYAPPRDFAAYRSRVKFSRSADAPAYQQGQNQLYNELNLGRREEYDVLDKRRGRDPEMGGKPRRKNPQEGLYNELQKDKMAEAYSEIGMKGERRRGKGHDGLYQGLSTATKDTYDALHMQALPPR

SEQ ID NO: 1491 - protein, 728 aa, synthetic construct
  REGION 1..728: note = Description of Artificial Sequence: Synthetic Chimeric Antigen Receptor
LLVTSLLLCELPHPAFLLIPDTALQLQQSGAELVRPGASVTLSCKASGYTFTDYEMHWVKQTPVHGLEWIGAIDPETGGTAYNQKFEGKAILTADKSSSTAYMELRSLTSEDSPVYYCARRRYYGSSSFDYWGQGTTLTVSSGGGGSGGGGSGGGGSDVQMIQTPSSLSASLGDRVTISCRASQDIGNYLNWYQQKPDGTVKLLIYYTSRLHSGVPSRFSGSGSGTEYSLTISNLEQEDIATYFCQQGSALPPTFGGGTKLEINRAEPKSCDKTHTCPPCPAPELLGGPSVFLFPPKPKDTLMISRTPEVTCVVVDVSHEDPEVKFNWYVDGVEVHNAKTKPREEQYNSTYRVVSVLTVLHQDWLNGKEYKCKVSNKALPAPIEKTISKAKGQPREPQVYTLPPSRDELTKNQVSLTCLVKGFYPSDIAVEWESNGQPENNYKTTPPVLDSDGSFFLYSKLTVDKSRWQQGNVFSCSVMHEALHNHYTQKSLSLSPGKKDPKAAATTTPAPRPPTPAPTIASQPLSLRPEACRPAAGGAVHTRGLDFACDIYIWAPLAGTCGVLLLSLVITLYCKRGRKKLLYIFKQPFMRPVQTTQEEDGCSCRFPEEEEGGCELRVKFSRSADAPAYKQGQNQLYNELNLGRREEYDVLDKRRGRDPEMGGKPRRKNPQEGLYNELQKDKMAEAYSEIGMKGERRRGKGHDGLYQGLSTATKDTYDALHMQALPPR

SEQ ID NO: 1492 - protein, 491 aa, synthetic construct
  REGION 1..491: note = Description of Artificial Sequence: Synthetic Chimeric Antigen Receptor
LLVTSLLLCELPHPAFLLIPDTALQLQQSGAELVRPGASVTLSCKASGYTFTDYEMHWVKQTPVHGLEWIGAIDPETGGTAYNQKFEGKAILTADKSSSTAYMELRSLTSEDSPVYYCARRRYYGSSSFDYWGQGTTLTVSSGGGGSGGGGSGGGGSDVQMIQTPSSLSASLGDRVTISCRASQDIGNYLNWYQQKPDGTVKLLIYYTSRLHSGVPSRFSGSGSGTEYSLTISNLEQEDIATYFCQQGSALPPTFGGGTKLEINRAAATTTPAPRPPTPAPTIASQPLSLRPEACRPAAGGAVHTRGLDFACDIYIWAPLAGTCGVLLLSLVITLYCKRGRKKLLYIFKQPFMRPVQTTQEEDGCSCRFPEEEEGGCELRVKFSRSADAPAYKQGQNQLYNELNLGRREEYDVLDKRRGRDPEMGGKPRRKNPQEGLYNELQKDKMAEAYSEIGMKGERRRGKGHDGLYQGLSTATKDTYDALHMQALPPR

SEQ ID NO: 1493 - protein, 788 aa, synthetic construct
  REGION 1..788: note = Description of Artificial Sequence: Synthetic Chimeric Antigen Receptor
LLVTSLLLCELPHPAFLLIPDTALQLQQSGAELVRPGASVTLSCKASGYTFTDYEMHWVKQTPVHGLEWIGAIDPETGGTAYNQKFEGKAILTADKSSSTAYMELRSLTSEDSPVYYCARRRYYGSSSFDYWGQGTTLTVSSGGGGSGGGGSGGGGSDVQMIQTPSSLSASLGDRVTISCRASQDIGNYLNWYQQKPDGTVKLLIYYTSRLHSGVPSRFSGSGSGTEYSLTISNLEQEDIATYFCQQGSALPPTFGGGTKLEINRAEPKSCDKTHTCPPCPAPELLGGPSVFLFPPKPKDTLMISRTPEVTCVVVDVSHEDPEVKFNWYVDGVEVHNAKTKPREEQYNSTYRVVSVLTVLHQDWLNGKEYKCKVSNKALPAPIEKTISKAKGQPREPQVYTLPPSRDELTKNQVSLTCLVKGFYPSDIAVEWESNGQPENNYKTTPPVLDSDGSFFLYSKLTVDKSRWQQGNVFSCSVMHEALHNHYTQKSLSLSPGKKDPKAAAFVPVFLPAKPTTTPAPRPPTPAPTIASQPLSLRPEACRPAAGGAVHTRGLDFACDIYIWAPLAGTCGVLLLSLVITLYCNHRNRSKRSRLLHSDYMNMTPRRPGPTRKHYQPYAPPRDFAAYRSRFSVVKRGRKKLLYIFKQPFMRPVQTTQEEDGCSCRFPEEEEGGCELRVKFSRSADAPAYQQGQNQLYNELNLGRREEYDVLDKRRGRDPEMGGKPRRKNPQEGLYNELQKDKMAEAYSEIGMKGERRRGKGHDGLYQGLSTATKDTYDALHMQALPPR

SEQ ID NO: 1494 - protein, 551 aa, synthetic construct
  REGION 1..551: note = Description of Artificial Sequence: Synthetic Chimeric Antigen Receptor
LLVTSLLLCELPHPAFLLIPDTALQLQQSGAELVRPGASVTLSCKASGYTFTDYEMHWVKQTPVHGLEWIGAIDPETGGTAYNQKFEGKAILTADKSSSTAYMELRSLTSEDSPVYYCARRRYYGSSSFDYWGQGTTLTVSSGGGGSGGGGSGGGGSDVQMIQTPSSLSASLGDRVTISCRASQDIGNYLNWYQQKPDGTVKLLIYYTSRLHSGVPSRFSGSGSGTEYSLTISNLEQEDIATYFCQQGSALPPTFGGGTKLEINRAAAFVPVFLPAKPTTTPAPRPPTPAPTIASQPLSLRPEACRPAAGGAVHTRGLDFACDIYIWAPLAGTCGVLLLSLVITLYCNHRNRSKRSRLLHSDYMNMTPRRPGPTRKHYQPYAPPRDFAAYRSRFSVVKRGRKKLLYIFKQPFMRPVQTTQEEDGCSCRFPEEEEGGCELRVKFSRSADAPAYQQGQNQLYNELNLGRREEYDVLDKRRGRDPEMGGKPRRKNPQEGLYNELQKDKMAEAYSEIGMKGERRRGKGHDGLYQGLSTATKDTYDALHMQALPPR

SEQ ID NO: 1495 - protein, 728 aa, synthetic construct
  REGION 1..728: note = Description of Artificial Sequence: Synthetic Chimeric Antigen Receptor
LLVTSLLLCELPHPAFLLIPDTQVQLQQSGAEVKKPGSSVKVSCKASGFSLTSYAISWVRQAPGQGLEWMGGIIWSGGATNYAQKFQGRVTITADESTSTAYMELSSLRSEDTAVYYCAREHYYGSSAMDYWWGQGTMVTVSSGGGGSGGGGSGGGGSEIVLTQSPATLSLSPGERATLSCRASQSIVHSYGNTYAWYQQKPGQAPRLLIYRVSRATGIPARFSGSGSGTDFTLTISSLEPEDFAVYYCFQGTHVPYTFFGQGTKLEIKREPKSCDKTHTCPPCPAPELLGGPSVFLFPPKPKDTLMISRTPEVTCVVVDVSHEDPEVKFNWYVDGVEVHNAKTKPREEQYNSTYRVVSVLTVLHQDWLNGKEYKCKVSNKALPAPIEKTISKAKGQPREPQVYTLPPSRDELTKNQVSLTCLVKGFYPSDIAVEWESNGQPENNYKTTPPVLDSDGSFFLYSKLTVDKSRWQQGNVFSCSVMHEALHNHYTQKSLSLSPGKKDPKAAAIEVMYPPPYLDNEKSNGTIIHVKGKHLCPSPLFPGPSKPFWVLVVVGGVLACYSLLVTVAFIIFWVRSKRSRLLHSDYMNMTPRRPGPTRKHYQPYAPPRDFAAYRSRVKFSRSADAPAYQQGQNQLYNELNLGRREEYDVLDKRRGRDPEMGGKPRRKNPQEGLYNELQKDKMAEAYSEIGMKGERRRGKGHDGLYQGLSTATKDTYDALHMQALPPR

SEQ ID NO: 1496 - protein, 492 aa, synthetic construct
  REGION 1..492: note = Description of Artificial Sequence: Synthetic Chimeric Antigen Receptor
LLVTSLLLCELPHPAFLLIPDTQVQLQQSGAEVKKPGSSVKVSCKASGFSLTSYAISWVRQAPGQGLEWMGGIIWSGGATNYAQKFQGRVTITADESTSTAYMELSSLRSEDTAVYYCAREHYYGSSAMDYWWGQGTMVTVSSGGGGSGGGGSGGGGSEIVLTQSPATLSLSPGERATLSCRASQSIVHSYGNTYAWYQQKPGQAPRLLIYRVSRATGIPARFSGSGSGTDFTLTISSLEPEDFAVYYCFQGTHVPYTFFGQGTKLEIKRAAAIEVMYPPPYLDNEKSNGTIIHVKGKHLCPSPLFPGPSKPFWVLVVVGGVLACYSLLVTVAFIIFWVRSKRSRLLHSDYMNMTPRRPGPTRKHYQPYAPPRDFAAYRSRVKFSRSADAPAYQQGQNQLYNELNLGRREEYDVLDKRRGRDPEMGGKPRRKNPQEGLYNELQKDKMAEAYSEIGMKGERRRGKGHDGLYQGLSTATKDTYDALHMQALPPR

SEQ ID NO: 1497 - protein, 732 aa, synthetic construct [sequence omitted]

SEQ ID NO: 1498 - protein, 496 aa, synthetic construct
  REGION 1..496: note = Description of Artificial Sequence: Synthetic Chimeric Antigen Receptor
LLVTSLLLCELPHPAFLLIPDTQVQLQQSGAEVKKPGSSVKVSCKASGFSLTSYAISWVRQAPGQGLEWMGGIIWSGGATNYAQKFQGRVTITADESTSTAYMELSSLRSEDTAVYYCAREHYYGSSAMDYWWGQGTMVTVSSGGGGSGGGGSGGGGSEIVLTQSPATLSLSPGERATLSCRASQSIVHSYGNTYAWYQQKPGQAPRLLIYRVSRATGIPARFSGSGSGTDFTLTISSLEPEDFAVYYCFQGTHVPYTFFGQGTKLEIKRAAATTTPAPRPPTPAPTIASQPLSLRPEACRPAAGGAVHTRGLDFACDIYIWAPLAGTCGVLLLSLVITLYCKRGRKKLLYIFKQPFMRPVQTTQEEDGCSCRFPEEEEGGCELRVKFSRSADAPAYKQGQNQLYNELNLGRREEYDVLDKRRGRDPEMGGKPRRKNPQEGLYNELQKDKMAEAYSEIGMKGERRRGKGHDGLYQGLSTATKDTYDALHMQALPPR

SEQ ID NO: 1499 - protein, 792 aa, synthetic construct
  REGION 1..792: note = Description of Artificial Sequence: Synthetic Chimeric Antigen Receptor
LLVTSLLLCELPHPAFLLIPDTQVQLQQSGAEVKKPGSSVKVSCKASGFSLTSYAISWVRQAPGQGLEWMGGIIWSGGATNYAQKFQGRVTITADESTSTAYMELSSLRSEDTAVYYCAREHYYGSSAMDYWWGQGTMVTVSSGGGGSGGGGSGGGGSEIVLTQSPATLSLSPGERATLSCRASQSIVHSYGNTYAWYQQKPGQAPRLLIYRVSRATGIPARFSGSGSGTDFTLTISSLEPEDFAVYYCFQGTHVPYTFFGQGTKLEIKREPKSCDKTHTCPPCPAPELLGGPSVFLFPPKPKDTLMISRTPEVTCVVVDVSHEDPEVKFNWYVDGVEVHNAKTKPREEQYNSTYRVVSVLTVLHQDWLNGKEYKCKVSNKALPAPIEKTISKAKGQPREPQVYTLPPSRDELTKNQVSLTCLVKGFYPSDIAVEWESNGQPENNYKTTPPVLDSDGSFFLYSKLTVDKSRWQQGNVFSCSVMHEALHNHYTQKSLSLSPGKKDPKAAAFVPVFLPAKPTTTPAPRPPTPAPTIASQPLSLRPEACRPAAGGAVHTRGLDFACDIYIWAPLAGTCGVLLLSLVITLYCNHRNRSKRSRLLHSDYMNMTPRRPGPTRKHYQPYAPPRDFAAYRSRFSVVKRGRKKLLYIFKQPFMRPVQTTQEEDGCSCRFPEEEEGGCELRVKFSRSADAPAYQQGQNQLYNELNLGRREEYDVLDKRRGRDPEMGGKPRRKNPQEGLYNELQKDKMAEAYSEIGMKGERRRGKGHDGLYQGLSTATKDTYDALHMQALPPR

SEQ ID NO: 1500 - protein, 556 aa, synthetic construct
  REGION 1..556: note = Description of Artificial Sequence: Synthetic Chimeric Antigen Receptor
LLVTSLLLCELPHPAFLLIPDTQVQLQQSGAEVKKPGSSVKVSCKASGFSLTSYAISWVRQAPGQGLEWMGGIIWSGGATNYAQKFQGRVTITADESTSTAYMELSSLRSEDTAVYYCAREHYYGSSAMDYWWGQGTMVTVSSGGGGSGGGGSGGGGSEIVLTQSPATLSLSPGERATLSCRASQSIVHSYGNTYAWYQQKPGQAPRLLIYRVSRATGIPARFSGSGSGTDFTLTISSLEPEDFAVYYCFQGTHVPYTFFGQGTKLEIKRAAAFVPVFLPAKPTTTPAPRPPTPAPTIASQPLSLRPEACRPAAGGAVHTRGLDFACDIYIWAPLAGTCGVLLLSLVITLYCNHRNRSKRSRLLHSDYMNMTPRRPGPTRKHYQPYAPPRDFAAYRSRFSVVKRGRKKLLYIFKQPFMRPVQTTQEEDGCSCRFPEEEEGGCELRVKFSRSADAPAYQQGQNQLYNELNLGRREEYDVLDKRRGRDPEMGGKPRRKNPQEGLYNELQKDKMAEAYSEIGMKGERRRGKGHDGLYQGLSTATKDTYDALHMQALPPR

SEQ ID NO: 1501 - protein, 728 aa, synthetic construct
  REGION 1..728: note = Description of Artificial Sequence: Synthetic Chimeric Antigen Receptor
LLVTSLLLCELPHPAFLLIPDTQVQLQQSGAEVKKPGSSVKVSCKASGYAFSSYISWVRQAPGQGLEWMGGQIYPGDGDTNYAQKFQGRVTITADESTSTAYMELSSLRSEDTAVYYCVRYYYGSSGYFDYWWGQGTMVTVSSGGGGSGGGGSGGGGSEIVLTQSPATLSLSPGERATLSCRASESVDNYGISFAWYQQKPGQAPRLLIYRASRATGIPARFSGSGSGTDFTLTISSLEPEDFAVYYCQQNNKDPPTFFGQGTKLEIKRAEPKSCDKTHTCPPCPAPELLGGPSVFLFPPKPKDTLMISRTPEVTCVVVDVSHEDPEVKFNWYVDGVEVHNAKTKPREEQYNSTYRVVSVLTVLHQDWLNGKEYKCKVSNKALPAPIEKTISKAKGQPREPQVYTLPPSRDELTKNQVSLTCLVKGFYPSDIAVEWESNGQPENNYKTTPPVLDSDGSFFLYSKLTVDKSRWQQGNVFSCSVMHEALHNHYTQKSLSLSPGKKDPKAAAIEVMYPPPYLDNEKSNGTIIHVKGKHLCPSPLFPGPSKPFWVLVVVGGVLACYSLLVTVAFIIFWVRSKRSRLLHSDYMNMTPRRPGPTRKHYQPYAPPRDFAAYRSRVKFSRSADAPAYQQGQNQLYNELNLGRREEYDVLDKRRGRDPEMGGKPRRKNPQEGLYNELQKDKMAEAYSEIGMKGERRRGKGHDGLYQGLSTATKDTYDALHMQALPPR

SEQ ID NO: 1502 - protein, 491 aa, synthetic construct
  REGION 1..491: note = Description of Artificial Sequence: Synthetic Chimeric Antigen Receptor
LLVTSLLLCELPHPAFLLIPDTQVQLQQSGAEVKKPGSSVKVSCKASGYAFSSYISWVRQAPGQGLEWMGGQIYPGDGDTNYAQKFQGRVTITADESTSTAYMELSSLRSEDTAVYYCVRYYYGSSGYFDYWWGQGTMVTVSSGGGGSGGGGSGGGGSEIVLTQSPATLSLSPGERATLSCRASESVDNYGISFAWYQQKPGQAPRLLIYRASRATGIPARFSGSGSGTDFTLTISSLEPEDFAVYYCQQNNKDPPTFFGQGTKLEIKRAAAIEVMYPPPYLDNEKSNGTIIHVKGKHLCPSPLFPGPSKPFWVLVVVGGVLACYSLLVTVAFIIFWVRSKRSRLLHSDYMNMTPRRPGPTRKHYQPYAPPRDFAAYRSRVKFSRSADAPAYQQGQNQLYNELNLGRREEYDVLDKRRGRDPEMGGKPRRKNPQEGLYNELQKDKMAEAYSEIGMKGERRRGKGHDGLYQGLSTATKDTYDALHMQALPPR

SEQ ID NO: 1503 - protein, 732 aa, synthetic construct
  REGION 1..732: note = Description of Artificial Sequence: Synthetic Chimeric Antigen Receptor
LLVTSLLLCELPHPAFLLIPDTQVQLQQSGAEVKKPGSSVKVSCKASGYAFSSYISWVRQAPGQGLEWMGGQIYPGDGDTNYAQKFQGRVTITADESTSTAYMELSSLRSEDTAVYYCVRYYYGSSGYFDYWWGQGTMVTVSSGGGGSGGGGSGGGGSEIVLTQSPATLSLSPGERATLSCRASESVDNYGISFAWYQQKPGQAPRLLIYRASRATGIPARFSGSGSGTDFTLTISSLEPEDFAVYYCQQNNKDPPTFFGQGTKLEIKRAEPKSCDKTHTCPPCPAPELLGGPSVFLFPPKPKDTLMISRTPEVTCVVVDVSHEDPEVKFNWYVDGVEVHNAKTKPREEQYNSTYRVVSVLTVLHQDWLNGKEYKCKVSNKALPAPIEKTISKAKGQPREPQVYTLPPSRDELTKNQVSLTCLVKGFYPSDIAVEWESNGQPENNYKTTPPVLDSDGSFFLYSKLTVDKSRWQQGNVFSCSVMHEALHNHYTQKSLSLSPGKKDPKAAATTTPAPRPPTPAPTIASQPLSLRPEACRPAAGGAVHTRGLDFACDIYIWAPLAGTCGVLLLSLVITLYCKRGRKKLLYIFKQPFMRPVQTTQEEDGCSCRFPEEEEGGCELRVKFSRSADAPAYKQGQNQLYNELNLGRREEYDVLDKRRGRDPEMGGKPRRKNPQEGLYNELQKDKMAEAYSEIGMKGERRRGKGHDGLYQGLSTATKDTYDALHMQALPPR

SEQ ID NO: 1504 - protein, 495 aa, synthetic construct
  REGION 1..495: note = Description of Artificial Sequence: Synthetic Chimeric Antigen Receptor
LLVTSLLLCELPHPAFLLIPDTQVQLQQSGAEVKKPGSSVKVSCKASGYAFSSYISWVRQAPGQGLEWMGGQIYPGDGDTNYAQKFQGRVTITADESTSTAYMELSSLRSEDTAVYYCVRYYYGSSGYFDYWWGQGTMVTVSSGGGGSGGGGSGGGGSEIVLTQSPATLSLSPGERATLSCRASESVDNYGISFAWYQQKPGQAPRLLIYRASRATGIPARFSGSGSGTDFTLTISSLEPEDFAVYYCQQNNKDPPTFFGQGTKLEIKRAAATTTPAPRPPTPAPTIASQPLSLRPEACRPAAGGAVHTRGLDFACDIYIWAPLAGTCGVLLLSLVITLYCKRGRKKLLYIFKQPFMRPVQTTQEEDGCSCRFPEEEEGGCELRVKFSRSADAPAYKQGQNQLYNELNLGRREEYDVLDKRRGRDPEMGGKPRRKNPQEGLYNELQKDKMAEAYSEIGMKGERRRGKGHDGLYQGLSTATKDTYDALHMQALPPR

SEQ ID NO: 1505 - protein, 792 aa, synthetic construct
  REGION 1..792: note = Description of Artificial Sequence: Synthetic Chimeric Antigen Receptor
LLVTSLLLCELPHPAFLLIPDTQVQLQQSGAEVKKPGSSVKVSCKASGYAFSSYISWVRQAPGQGLEWMGGQIYPGDGDTNYAQKFQGRVTITADESTSTAYMELSSLRSEDTAVYYCVRYYYGSSGYFDYWWGQGTMVTVSSGGGGSGGGGSGGGGSEIVLTQSPATLSLSPGERATLSCRASESVDNYGISFAWYQQKPGQAPRLLIYRASRATGIPARFSGSGSGTDFTLTISSLEPEDFAVYYCQQNNKDPPTFFGQGTKLEIKRAEPKSCDKTHTCPPCPAPELLGGPSVFLFPPKPKDTLMISRTPEVTCVVVDVSHEDPEVKFNWYVDGVEVHNAKTKPREEQYNSTYRVVSVLTVLHQDWLNGKEYKCKVSNKALPAPIEKTISKAKGQPREPQVYTLPPSRDELTKNQVSLTCLVKGFYPSDIAVEWESNGQPENNYKTTPPVLDSDGSFFLYSKLTVDKSRWQQGNVFSCSVMHEALHNHYTQKSLSLSPGKKDPKAAAFVPVFLPAKPTTTPAPRPPTPAPTIASQPLSLRPEACRPAAGGAVHTRGLDFACDIYIWAPLAGTCGVLLLSLVITLYCNHRNRSKRSRLLHSDYMNMTPRRPGPTRKHYQPYAPPRDFAAYRSRFSVVKRGRKKLLYIFKQPFMRPVQTTQEEDGCSCRFPEEEEGGCELRVKFSRSADAPAYQQGQNQLYNELNLGRREEYDVLDKRRGRDPEMGGKPRRKNPQEGLYNELQKDKMAEAYSEIGMKGERRRGKGHDGLYQGLSTATKDTYDALHMQALPPR

SEQ ID NO: 1506 - protein, 555 aa, synthetic construct
  REGION 1..555: note = Description of Artificial Sequence: Synthetic Chimeric Antigen Receptor
LLVTSLLLCELPHPAFLLIPDTQVQLQQSGAEVKKPGSSVKVSCKASGYAFSSYISWVRQAPGQGLEWMGGQIYPGDGDTNYAQKFQGRVTITADESTSTAYMELSSLRSEDTAVYYCVRYYYGSSGYFDYWWGQGTMVTVSSGGGGSGGGGSGGGGSEIVLTQSPATLSLSPGERATLSCRASESVDNYGISFAWYQQKPGQAPRLLIYRASRATGIPARFSGSGSGTDFTLTISSLEPEDFAVYYCQQNNKDPPTFFGQGTKLEIKRAAAFVPVFLPAKPTTTPAPRPPTPAPTIASQPLSLRPEACRPAAGGAVHTRGLDFACDIYIWAPLAGTCGVLLLSLVITLYCNHRNRSKRSRLLHSDYMNMTPRRPGPTRKHYQPYAPPRDFAAYRSRFSVVKRGRKKLLYIFKQPFMRPVQTTQEEDGCSCRFPEEEEGGCELRVKFSRSADAPAYQQGQNQLYNELNLGRREEYDVLDKRRGRDPEMGGKPRRKNPQEGLYNELQKDKMAEAYSEIGMKGERRRGKGHDGLYQGLSTATKDTYDALHMQALPPR

SEQ ID NO: 1507 - protein, 726 aa, synthetic construct
  REGION 1..726: note = Description of Artificial Sequence: Synthetic Chimeric Antigen Receptor
LLVTSLLLCELPHPAFLLIPDTQVQLQQSGAEVKKPGSSVKVSCKASGYTFTDHFISWVRQAPGQGLEWMGGLNPYSGGTNYAQKFQGRVTITADESTSTAYMELSSLRSEDTAVYYCARHNWGAYFDYWWGQGTMVTVSSGGGGSGGGGSGGGGSEIVLTQSPATLSLSPGERATLSCRASKSLLHSNGNTYAWYQQKPGQAPRLLIYYMSRATGIPARFSGSGSGTDFTLTISSLEPEDFAVYYCMQGLEDPYTFFGQGTKLEIKREPKSCDKTHTCPPCPAPELLGGPSVFLFPPKPKDTLMISRTPEVTCVVVDVSHEDPEVKFNWYVDGVEVHNAKTKPREEQYNSTYRVVSVLTVLHQDWLNGKEYKCKVSNKALPAPIEKTISKAKGQPREPQVYTLPPSRDELTKNQVSLTCLVKGFYPSDIAVEWESNGQPENNYKTTPPVLDSDGSFFLYSKLTVDKSRWQQGNVFSCSVMHEALHNHYTQKSLSLSPGKKDPKAAAIEVMYPPPYLDNEKSNGTIIHVKGKHLCPSPLFPGPSKPFWVLVVVGGVLACYSLLVTVAFIIFWVRSKRSRLLHSDYMNMTPRRPGPTRKHYQPYAPPRDFAAYRSRVKFSRSADAPAYQQGQNQLYNELNLGRREEYDVLDKRRGRDPEMGGKPRRKNPQEGLYNELQKDKMAEAYSEIGMKGERRRGKGHDGLYQGLSTATKDTYDALHMQALPPR

SEQ ID NO: 1508 - protein, 490 aa, synthetic construct
  REGION 1..490: note = Description of Artificial Sequence: Synthetic Chimeric Antigen Receptor
LLVTSLLLCELPHPAFLLIPDTQVQLQQSGAEVKKPGSSVKVSCKASGYTFTDHFISWVRQAPGQGLEWMGGLNPYSGGTNYAQKFQGRVTITADESTSTAYMELSSLRSEDTAVYYCARHNWGAYFDYWWGQGTMVTVSSGGGGSGGGGSGGGGSEIVLTQSPATLSLSPGERATLSCRASKSLLHSNGNTYAWYQQKPGQAPRLLIYYMSRATGIPARFSGSGSGTDFTLTISSLEPEDFAVYYCMQGLEDPYTFFGQGTKLEIKRAAAIEVMYPPPYLDNEKSNGTIIHVKGKHLCPSPLFPGPSKPFWVLVVVGGVLACYSLLVTVAFIIFWVRSKRSRLLHSDYMNMTPRRPGPTRKHYQPYAPPRDFAAYRSRVKFSRSADAPAYQQGQNQLYNELNLGRREEYDVLDKRRGRDPEMGGKPRRKNPQEGLYNELQKDKMAEAYSEIGMKGERRRGKGHDGLYQGLSTATKDTYDALHMQALPPR

SEQ ID NO: 1509 - protein, 730 aa, synthetic construct
  REGION 1..730: note = Description of Artificial Sequence: Synthetic Chimeric Antigen Receptor
LLVTSLLLCELPHPAFLLIPDTQVQLQQSGAEVKKPGSSVKVSCKASGYTFTDHFISWVRQAPGQGLEWMGGLNPYSGGTNYAQKFQGRVTITADESTSTAYMELSSLRSEDTAVYYCARHNWGAYFDYWWGQGTMVTVSSGGGGSGGGGSGGGGSEIVLTQSPATLSLSPGERATLSCRASKSLLHSNGNTYAWYQQKPGQAPRLLIYYMSRATGIPARFSGSGSGTDFTLTISSLEPEDFAVYYCMQGLEDPYTFFGQGTKLEIKREPKSCDKTHTCPPCPAPELLGGPSVFLFPPKPKDTLMISRTPEVTCVVVDVSHEDPEVKFNWYVDGVEVHNAKTKPREEQYNSTYRVVSVLTVLHQDWLNGKEYKCKVSNKALPAPIEKTISKAKGQPREPQVYTLPPSRDELTKNQVSLTCLVKGFYPSDIAVEWESNGQPENNYKTTPPVLDSDGSFFLYSKLTVDKSRWQQGNVFSCSVMHEALHNHYTQKSLSLSPGKKDPKAAATTTPAPRPPTPAPTIASQPLSLRPEACRPAAGGAVHTRGLDFACDIYIWAPLAGTCGVLLLSLVITLYCKRGRKKLLYIFKQPFMRPVQTTQEEDGCSCRFPEEEEGGCELRVKFSRSADAPAYKQGQNQLYNELNLGRREEYDVLDKRRGRDPEMGGKPRRKNPQEGLYNELQKDKMAEAYSEIGMKGERRRGKGHDGLYQGLSTATKDTYDALHMQALPPR

SEQ ID NO: 1510 - protein, 494 aa, synthetic construct
  REGION 1..494: note = Description of Artificial Sequence: Synthetic Chimeric Antigen Receptor
LLVTSLLLCELPHPAFLLIPDTQVQLQQSGAEVKKPGSSVKVSCKASGYTFTDHFISWVRQAPGQGLEWMGGLNPYSGGTNYAQKFQGRVTITADESTSTAYMELSSLRSEDTAVYYCARHNWGAYFDYWWGQGTMVTVSSGGGGSGGGGSGGGGSEIVLTQSPATLSLSPGERATLSCRASKSLLHSNGNTYAWYQQKPGQAPRLLIYYMSRATGIPARFSGSGSGTDFTLTISSLEPEDFAVYYCMQGLEDPYTFFGQGTKLEIKRAAATTTPAPRPPTPAPTIASQPLSLRPEACRPAAGGAVHTRGLDFACDIYIWAPLAGTCGVLLLSLVITLYCKRGRKKLLYIFKQPFMRPVQTTQEEDGCSCRFPEEEEGGCELRVKFSRSADAPAYKQGQNQLYNELNLGRREEYDVLDKRRGRDPEMGGKPRRKNPQEGLYNELQKDKMAEAYSEIGMKGERRRGKGHDGLYQGLSTATKDTYDALHMQALPPR

SEQ ID NO: 1511 - protein, 790 aa, synthetic construct
  REGION 1..790: note = Description of Artificial Sequence: Synthetic Chimeric Antigen Receptor
LLVTSLLLCELPHPAFLLIPDTQVQLQQSGAEVKKPGSSVKVSCKASGYTFTDHFISWVRQAPGQGLEWMGGLNPYSGGTNYAQKFQGRVTITADESTSTAYMELSSLRSEDTAVYYCARHNWGAYFDYWWGQGTMVTVSSGGGGSGGGGSGGGGSEIVLTQSPATLSLSPGERATLSCRASKSLLHSNGNTYAWYQQKPGQAPRLLIYYMSRATGIPARFSGSGSGTDFTLTISSLEPEDFAVYYCMQGLEDPYTFFGQGTKLEIKREPKSCDKTHTCPPCPAPELLGGPSVFLFPPKPKDTLMISRTPEVTCVVVDVSHEDPEVKFNWYVDGVEVHNAKTKPREEQYNSTYRVVSVLTVLHQDWLNGKEYKCKVSNKALPAPIEKTISKAKGQPREPQVYTLPPSRDELTKNQVSLTCLVKGFYPSDIAVEWESNGQPENNYKTTPPVLDSDGSFFLYSKLTVDKSRWQQGNVFSCSVMHEALHNHYTQKSLSLSPGKKDPKAAAFVPVFLPAKPTTTPAPRPPTPAPTIASQPLSLRPEACRPAAGGAVHTRGLDFACDIYIWAPLAGTCGVLLLSLVITLYCNHRNRSKRSRLLHSDYMNMTPRRPGPTRKHYQPYAPPRDFAAYRSRFSVVKRGRKKLLYIFKQPFMRPVQTTQEEDGCSCRFPEEEEGGCELRVKFSRSADAPAYQQGQNQLYNELNLGRREEYDVLDKRRGRDPEMGGKPRRKNPQEGLYNELQKDKMAEAYSEIGMKGERRRGKGHDGLYQGLSTATKDTYDALHMQALPPR

SEQ ID NO: 1512 - protein, 554 aa, synthetic construct
  REGION 1..554: note = Description of Artificial Sequence: Synthetic Chimeric Antigen Receptor
LLVTSLLLCELPHPAFLLIPDTQVQLQQSGAEVKKPGSSVKVSCKASGYTFTDHFISWVRQAPGQGLEWMGGLNPYSGGTNYAQKFQGRVTITADESTSTAYMELSSLRSEDTAVYYCARHNWGAYFDYWWGQGTMVTVSSGGGGSGGGGSGGGGSEIVLTQSPATLSLSPGERATLSCRASKSLLHSNGNTYAWYQQKPGQAPRLLIYYMSRATGIPARFSGSGSGTDFTLTISSLEPEDFAVYYCMQGLEDPYTFFGQGTKLEIKRAAAFVPVFLPAKPTTTPAPRPPTPAPTIASQPLSLRPEACRPAAGGAVHTRGLDFACDIYIWAPLAGTCGVLLLSLVITLYCNHRNRSKRSRLLHSDYMNMTPRRPGPTRKHYQPYAPPRDFAAYRSRFSVVKRGRKKLLYIFKQPFMRPVQTTQEEDGCSCRFPEEEEGGCELRVKFSRSADAPAYQQGQNQLYNELNLGRREEYDVLDKRRGRDPEMGGKPRRKNPQEGLYNELQKDKMAEAYSEIGMKGERRRGKGHDGLYQGLSTATKDTYDALHMQALPPR

SEQ ID NO: 1513 - protein, 724 aa, synthetic construct
  REGION 1..724: note = Description of Artificial Sequence: Synthetic Chimeric Antigen Receptor
LLVTSLLLCELPHPAFLLIPDTQVQLQQSGAEVKKPGSSVKVSCKASGYTFTDYEISWVRQAPGQGLEWMGGIDPETGGTNYAQKFQGRVTITADESTSTAYMELSSLRSEDTAVYYCARRRYYGSSSFDYWWGQGTMVTVSSGGGGSGGGGSGGGGSEIVLTQSPATLSLSPGERATLSCRASQDIGNYAWYQQKPGQAPRLLIYYTSRATGIPARFSGSGSGTDFTLTISSLEPEDFAVYYCQQGSALPPTFFGQGTKLEIKRAEPKSCDKTHTCPPCPAPELLGGPSVFLFPPKPKDTLMISRTPEVTCVVVDVSHEDPEVKFNWYVDGVEVHNAKTKPREEQYNSTYRVVSVLTVLHQDWLNGKEYKCKVSNKALPAPIEKTISKAKGQPREPQVYTLPPSRDELTKNQVSLTCLVKGFYPSDIAVEWESNGQPENNYKTTPPVLDSDGSFFLYSKLTVDKSRWQQGNVFSCSVMHEALHNHYTQKSLSLSPGKKDPKAAAIEVMYPPPYLDNEKSNGTIIHVKGKHLCPSPLFPGPSKPFWVLVVVGGVLACYSLLVTVAFIIFWVRSKRSRLLHSDYMNMTPRRPGPTRKHYQPYAPPRDFAAYRSRVKFSRSADAPAYQQGQNQLYNELNLGRREEYDVLDKRRGRDPEMGGKPRRKNPQEGLYNELQKDKMAEAYSEIGMKGERRRGKGHDGLYQGLSTATKDTYDALHMQALPPR

SEQ ID NO: 1514 - protein, 487 aa, synthetic construct
  REGION 1..487: note = Description of Artificial Sequence: Synthetic Chimeric Antigen Receptor
LLVTSLLLCELPHPAFLLIPDTQVQLQQSGAEVKKPGSSVKVSCKASGYTFTDYEISWVRQAPGQGLEWMGGIDPETGGTNYAQKFQGRVTITADESTSTAYMELSSLRSEDTAVYYCARRRYYGSSSFDYWWGQGTMVTVSSGGGGSGGGGSGGGGSEIVLTQSPATLSLSPGERATLSCRASQDIGNYAWYQQKPGQAPRLLIYYTSRATGIPARFSGSGSGTDFTLTISSLEPEDFAVYYCQQGSALPPTFFGQGTKLEIKRAAAIEVMYPPPYLDNEKSNGTIIHVKGKHLCPSPLFPGPSKPFWVLVVVGGVLACYSLLVTVAFIIFWVRSKRSRLLHSDYMNMTPRRPGPTRKHYQPYAPPRDFAAYRSRVKFSRSADAPAYQQGQNQLYNELNLGRREEYDVLDKRRGRDPEMGGKPRRKNPQEGLYNELQKDKMAEAYSEIGMKGERRRGKGHDGLYQGLSTATKDTYDALHMQALPPR

SEQ ID NO: 1515 - protein, 728 aa, synthetic construct
  REGION 1..728: note = Description of Artificial Sequence: Synthetic Chimeric Antigen Receptor
LLVTSLLLCELPHPAFLLIPDTQVQLQQSGAEVKKPGSSVKVSCKASGYTFTDYEISWVRQAPGQGLEWMGGIDPETGGTNYAQKFQGRVTITADESTSTAYMELSSLRSEDTAVYYCARRRYYGSSSFDYWWGQGTMVTVSSGGGGSGGGGSGGGGSEIVLTQSPATLSLSPGERATLSCRASQDIGNYAWYQQKPGQAPRLLIYYTSRATGIPARFSGSGSGTDFTLTISSLEPEDFAVYYCQQGSALPPTFFGQGTKLEIKRAEPKSCDKTHTCPPCPAPELLGGPSVFLFPPKPKDTLMISRTPEVTCVVVDVSHEDPEVKFNWYVDGVEVHNAKTKPREEQYNSTYRVVSVLTVLHQDWLNGKEYKCKVSNKALPAPIEKTISKAKGQPREPQVYTLPPSRDELTKNQVSLTCLVKGFYPSDIAVEWESNGQPENNYKTTPPVLDSDGSFFLYSKLTVDKSRWQQGNVFSCSVMHEALHNHYTQKSLSLSPGKKDPKAAATTTPAPRPPTPAPTIASQPLSLRPEACRPAAGGAVHTRGLDFACDIYIWAPLAGTCGVLLLSLVITLYCKRGRKKLLYIFKQPFMRPVQTTQEEDGCSCRFPEEEEGGCELRVKFSRSADAPAYKQGQNQLYNELNLGRREEYDVLDKRRGRDPEMGGKPRRKNPQEGLYNELQKDKMAEAYSEIGMKGERRRGKGHDGLYQGLSTATKDTYDALHMQALPPR

SEQ ID NO: 1516 - protein, 491 aa, synthetic construct
  REGION 1..491: note = Description of Artificial Sequence: Synthetic Chimeric Antigen Receptor
LLVTSLLLCELPHPAFLLIPDTQVQLQQSGAEVKKPGSSVKVSCKASGYTFTDYEISWVRQAPGQGLEWMGGIDPETGGTNYAQKFQGRVTITADESTSTAYMELSSLRSEDTAVYYCARRRYYGSSSFDYWWGQGTMVTVSSGGGGSGGGGSGGGGSEIVLTQSPATLSLSPGERATLSCRASQDIGNYAWYQQKPGQAPRLLIYYTSRATGIPARFSGSGSGTDFTLTISSLEPEDFAVYYCQQGSALPPTFFGQGTKLEIKRAAATTTPAPRPPTPAPTIASQPLSLRPEACRPAAGGAVHTRGLDFACDIYIWAPLAGTCGVLLLSLVITLYCKRGRKKLLYIFKQPFMRPVQTTQEEDGCSCRFPEEEEGGCELRVKFSRSADAPAYKQGQNQLYNELNLGRREEYDVLDKRRGRDPEMGGKPRRKNPQEGLYNELQKDKMAEAYSEIGMKGERRRGKGHDGLYQGLSTATKDTYDALHMQALPPR

SEQ ID NO: 1517 - protein, 788 aa, synthetic construct [sequence omitted]

SEQ ID NO: 1518 - protein, 551 aa, synthetic construct
  REGION 1..551: note = Description of Artificial Sequence: Synthetic Chimeric Antigen Receptor
LLVTSLLLCELPHPAFLLIPDTQVQLQQSGAEVKKPGSSVKVSCKASGYTFTDYEISWVRQAPGQGLEWMGGIDPETGGTNYAQKFQGRVTITADESTSTAYMELSSLRSEDTAVYYCARRRYYGSSSFDYWWGQGTMVTVSSGGGGSGGGGSGGGGSEIVLTQSPATLSLSPGERATLSCRASQDIGNYAWYQQKPGQAPRLLIYYTSRATGIPARFSGSGSGTDFTLTISSLEPEDFAVYYCQQGSALPPTFFGQGTKLEIKRAAAFVPVFLPAKPTTTPAPRPPTPAPTIASQPLSLRPEACRPAAGGAVHTRGLDFACDIYIWAPLAGTCGVLLLSLVITLYCNHRNRSKRSRLLHSDYMNMTPRRPGPTRKHYQPYAPPRDFAAYRSRFSVVKRGRKKLLYIFKQPFMRPVQTTQEEDGCSCRFPEEEEGGCELRVKFSRSADAPAYQQGQNQLYNELNLGRREEYDVLDKRRGRDPEMGGKPRRKNPQEGLYNELQKDKMAEAYSEIGMKGERRRGKGHDGLYQGLSTATKDTYDALHMQALPPR

SEQ ID NO: 1519 - protein, 484 aa, synthetic construct
  REGION 1..484: note = Description of Artificial Sequence: Synthetic Chimeric Antigen Receptor
MLLLVTSLLLCELPHPAFLLIPQVQLQQSGPGLVKPSQTLSLTCAISGDSVSSNSAAWNWIRQSPSRGLEWLGRTYYRSKWYNDYAVSVKSRITINPDTSKNQFSLQLNSVTPEDTAVYYCAREVTGDLEDAFDIWGQGTMVTVSSGGGGSDIQMTQSPSSLSASVGDRVTITCRASQTIWSYLNWYQQRPGKAPNLLIYAASSLQSGVPSRFSGRGSGTDFTLTISSLQAEDFATYYCQQSYSIPQTFGQGTKLEIKAAATTTPAPRPPTPAPTIASQPLSLRPEACRPAAGGAVHTRGLDFACDIYIWAPLAGTCGVLLLSLVITLYCKRGRKKLLYIFKQPFMRPVQTTQEEDGCSCRFPEEEEGGCELRVKFSRSADAPAYKQGQNQLYNELNLGRREEYDVLDKRRGRDPEMGGKPRRKNPQEGLYNELQKDKMAEAYSEIGMKGERRRGKGHDGLYQGLSTATKDTYDALHMQALPPR

SEQ ID NO: 1520 - protein, 480 aa, synthetic construct
  REGION 1..480: note = Description of Artificial Sequence: Synthetic Chimeric Antigen Receptor
MLLLVTSLLLCELPHPAFLLIPQVQLQQSGPGLVKPSQTLSLTCAISGDSVSSNSAAWNWIRQSPSRGLEWLGRTYYRSKWYNDYAVSVKSRITINPDTSKNQFSLQLNSVTPEDTAVYYCAREVTGDLEDAFDIWGQGTMVTVSSGGGGSDIQMTQSPSSLSASVGDRVTITCRASQTIWSYLNWYQQRPGKAPNLLIYAASSLQSGVPSRFSGRGSGTDFTLTISSLQAEDFATYYCQQSYSIPQTFGQGTKLEIKAAAIEVMYPPPYLDNEKSNGTIIHVKGKHLCPSPLFPGPSKPFWVLVVVGGVLACYSLLVTVAFIIFWVRSKRSRLLHSDYMNMTPRRPGPTRKHYQPYAPPRDFAAYRSRVKFSRSADAPAYQQGQNQLYNELNLGRREEYDVLDKRRGRDPEMGGKPRRKNPQEGLYNELQKDKMAEAYSEIGMKGERRRGKGHDGLYQGLSTATKDTYDALHMQALPPR

SEQ ID NO: 1521 - protein, 544 aa, synthetic construct
  REGION 1..544: note = Description of Artificial Sequence: Synthetic Chimeric Antigen Receptor
MLLLVTSLLLCELPHPAFLLIPQVQLQQSGPGLVKPSQTLSLTCAISGDSVSSNSAAWNWIRQSPSRGLEWLGRTYYRSKWYNDYAVSVKSRITINPDTSKNQFSLQLNSVTPEDTAVYYCAREVTGDLEDAFDIWGQGTMVTVSSGGGGSDIQMTQSPSSLSASVGDRVTITCRASQTIWSYLNWYQQRPGKAPNLLIYAASSLQSGVPSRFSGRGSGTDFTLTISSLQAEDFATYYCQQSYSIPQTFGQGTKLEIKAAAFVPVFLPAKPTTTPAPRPPTPAPTIASQPLSLRPEACRPAAGGAVHTRGLDFACDIYIWAPLAGTCGVLLLSLVITLYCNHRNRSKRSRLLHSDYMNMTPRRPGPTRKHYQPYAPPRDFAAYRSRFSVVKRGRKKLLYIFKQPFMRPVQTTQEEDGCSCRFPEEEEGGCELRVKFSRSADAPAYQQGQNQLYNELNLGRREEYDVLDKRRGRDPEMGGKPRRKNPQEGLYNELQKDKMAEAYSEIGMKGERRRGKGHDGLYQGLSTATKDTYDALHMQALPPR

SEQ ID NO: 1522 - protein, 727 aa, synthetic construct
  REGION 1..727: note = Description of Artificial Sequence: Synthetic Chimeric Antigen Receptor
MVLLVTSLLLCELPHPAFLLIPDTEVQLVESGGGLVKPGGSLKLSCAASGFAFSIYDMSWVRQTPEKRLEWVAYISSGGGTYYPDTVKGRFTISRDNAKNTLYLQMSSLKSEDTAMYYCARHSGYGTHWGVLFAYWGQGTLVTVSAGGGGSGGGGSGGGGSDIQMTQTTSSLSASLGDRVTISCRASQDISNYLNWYQQKPDGTVKLLIYYTSILHSGVPSRFSGSGSGTDYSLTISNLEQEDFATYFCQQGNTLPWTFGGGTKLEIKAEPKSCDKTHTCPPCPAPELLGGPSVFLFPPKPKDTLMISRTPEVTCVVVDVSHEDPEVKFNWYVDGVEVHNAKTKPREEQYNSTYRVVSVLTVLHQDWLNGKEYKCKVSNKALPAPIEKTISKAKGQPREPQVYTLPPSRDELTKNQVSLTCLVKGFYPSDIAVEWESNGQPENNYKTTPPVLDSDGSFFLYSKLTVDKSRWQQGNVFSCSVMHEALHNHYTQKSLSLSPGKKDPKAAAIEVMYPPPYLDNEKSNGTIIHVKGKHLCPSPLFPGPSKPFWVLVVVGGVLACYSLLVTVAFIIFWVRSKRSRLLHSDYMNMTPRRPGPTRKHYQPYAPPRDFAAYRSRVKFSRSADAPAYQQGQNQLYNELNLGRREEYDVLDKRRGRDPEMGGKPRRKNPQEGLYNELQKDKMAEAYSEIGMKGERRRGKGHDGLYQGLSTATKDTYDALHMQALPPR

SEQ ID NO: 1523 - protein, 792 aa, synthetic construct
  REGION 1..792: note = Description of Artificial Sequence: Synthetic Chimeric Antigen Receptor
MVLLVTSLLLCELPHPAFLLIPDTEVQLVESGGGLVKPGGSLKLSCAASGFAFSIYDMSWVRQTPEKRLEWVAYISSGGGTYYPDTVKGRFTISRDNAKNTLYLQMSSLKSEDTAMYYCARHSGYGTHWGVLFAYWGQGTLVTVSAGGGGSGGGGSGGGGSDIQMTQTTSSLSASLGDRVTISCRASQDISNYLNWYQQKPDGTVKLLIYYTSILHSGVPSRFSGSGSGTDYSLTISNLEQEDFATYFCQQGNTLPWTFGGGTKLEIKAEPKSCDKTHTCPPCPAPELLGGPSVFLFPPKPKDTLMISRTPEVTCVVVDVSHEDPEVKFNWYVDGVEVHNAKTKPREEQYNSTYRVVSVLTVLHQDWLNGKEYKCKVSNKALPAPIEKTISKAKGQPREPQVYTLPPSRDELTKNQVSLTCLVKGFYPSDIAVEWESNGQPENNYKTTPPVLDSDGSFFLYSKLTVDKSRWQQGNVFSCSVMHEALHNHYTQKSLSLSPGKKDPKAAAAFVPVFLPAKPTTTPAPRPPTPAPTIASQPLSLRPEACRPAAGGAVHTRGLDFACDIYIWAPLAGTCGVLLLSLVITLYCNHRNRSKRSRLLHSDYMNMTPRRPGPTRKHYQPYAPPRDFAAYRSRFSVVKRGRKKLLYIFKQPFMRPVQTTQEEDGCSCRFPEEEEGGCELRVKFSRSADAPAYQQGQNQLYNELNLGRREEYDVLDKRRGRDPEMGGKPRRKNPQEGLYNELQKDKMAEAYSEIGMKGERRRGKGHDGLYQGLSTATKDTYDALHMQALPPR

SEQ ID NO: 1524 - protein, 506 aa, synthetic construct
  REGION 1..506: note = Description of Artificial Sequence: Synthetic Chimeric Antigen Receptor
MVLLVTSLLLCELPHPAFLLIPDTEVQLVESGGGLVKPGGSLKLSCAASGFAFSIYDMSWVRQTPEKRLEWVAYISSGGGTYYPDTVKGRFTISRDNAKNTLYLQMSSLKSEDTAMYYCARHSGYGTHWGVLFAYWGQGTLVTVSAGGGGSGGGGSGGGGSDIQMTQTTSSLSASLGDRVTISCRASQDISNYLNWYQQKPDGTVKLLIYYTSILHSGVPSRFSGSGSGTDYSLTISNLEQEDFATYFCQQGNTLPWTFGGGTKLEIKAKTTPPSVYGRVKDPKAAAIEVMYPPPYLDNEKSNGTIIHVKGKHLCPSPLFPGPSKPFWVLVVVGGVLACYSLLVTVAFIIFWVRSKRSRLLHSDYMNMTPRRPGPTRKHYQPYAPPRDFAAYRSRVKFSRSADAPAYQQGQNQLYNELNLGRREEYDVLDKRRGRDPEMGGKPRRKNPQEGLYNELQKDKMAEAYSEIGMKGERRRGKGHDGLYQGLSTATKDTYDALHMQALPPR

SEQ ID NO: 1525 - protein, 571 aa, synthetic construct
  REGION 1..571: note = Description of Artificial Sequence: Synthetic Chimeric Antigen Receptor
MVLLVTSLLLCELPHPAFLLIPDTEVQLVESGGGLVKPGGSLKLSCAASGFAFSIYDMSWVRQTPEKRLEWVAYISSGGGTYYPDTVKGRFTISRDNAKNTLYLQMSSLKSEDTAMYYCARHSGYGTHWGVLFAYWGQGTLVTVSAGGGGSGGGGSGGGGSDIQMTQTTSSLSASLGDRVTISCRASQDISNYLNWYQQKPDGTVKLLIYYTSILHSGVPSRFSGSGSGTDYSLTISNLEQEDFATYFCQQGNTLPWTFGGGTKLEIKAKTTPPSVYGRVKDPKAAAAFVPVFLPAKPTTTPAPRPPTPAPTIASQPLSLRPEACRPAAGGAVHTRGLDFACDIYIWAPLAGTCGVLLLSLVITLYCNHRNRSKRSRLLHSDYMNMTPRRPGPTRKHYQPYAPPRDFAAYRSRFSVVKRGRKKLLYIFKQPFMRPVQTTQEEDGCSCRFPEEEEGGCELRVKFSRSADAPAYQQGQNQLYNELNLGRREEYDVLDKRRGRDPEMGGKPRRKNPQEGLYNELQKDKMAEAYSEIGMKGERRRGKGHDGLYQGLSTATKDTYDALHMQALPPR

SEQ ID NO: 1526 - protein, 727 aa, synthetic construct
  REGION 1..727: note = Description of Artificial Sequence: Synthetic Chimeric Antigen Receptor
MVLLVTSLLLCELPHPAFLLIPDTEVQLVESGGGLVKPGGSLKLSCAASGFAFSIYDMSWVRQTPEKRLEWVAYISSGGGTYYPDTVKGRFTISRDNAKNTLYLQMSSLKSEDTAMYYCARHSGYGSSYGVLFAYWGQGTLVTVSAGGGGSGGGGSGGGGSDIQMTQTTSSLSASLGDRVTISCRASQDISNYLNWYQQKPDGTVKLLIYYTSILHSGVPSRFSGSGSGTDYSLTISNLEQEDFATYFCQQGNTLPWTFGGGTKLEIKAEPKSCDKTHTCPPCPAPELLGGPSVFLFPPKPKDTLMISRTPEVTCVVVDVSHEDPEVKFNWYVDGVEVHNAKTKPREEQYNSTYRVVSVLTVLHQDWLNGKEYKCKVSNKALPAPIEKTISKAKGQPREPQVYTLPPSRDELTKNQVSLTCLVKGFYPSDIAVEWESNGQPENNYKTTPPVLDSDGSFFLYSKLTVDKSRWQQGNVFSCSVMHEALHNHYTQKSLSLSPGKKDPKAAAIEVMYPPPYLDNEKSNGTIIHVKGKHLCPSPLFPGPSKPFWVLVVVGGVLACYSLLVTVAFIIFWVRSKRSRLLHSDYMNMTPRRPGPTRKHYQPYAPPRDFAAYRSRVKFSRSADAPAYQQGQNQLYNELNLGRREEYDVLDKRRGRDPEMGGKPRRKNPQEGLYNELQKDKMAEAYSEIGMKGERRRGKGHDGLYQGLSTATKDTYDALHMQALPPR

SEQ ID NO: 1527 - protein, 792 aa, synthetic construct [sequence omitted]

SEQ ID NO: 1528 - protein, 511 aa, synthetic construct
  REGION 1..511: note = Description of Artificial Sequence: Synthetic Chimeric Antigen Receptor
MVLLVTSLLLCELPHPAFLLIPDTEVQLVESGGGLVKPGGSLKLSCAASGFAFSIYDMSWVRQTPEKRLEWVAYISSGGGTYYPDTVKGRFTISRDNAKNTLYLQMSSLKSEDTAMYYCARHSGYGTHWGVLFAYWGQGTLVTVSAGGGGSGGGGSGGGGSDIQMTQTTSSLSASLGDRVTISCRASQDISNYLNWYQQKPDGTVKLLIYYTSILHSGVPSRFSGSGSGTDYSLTISNLEQEDFATYFCQQGNTLPWTFGGGTKLEIKAKTTPPSVYGRVKDPKAAAATTTPAPRPPTPAPTIASQPLSLRPEACRPAAGGAVHTRGLDFACDIYIWAPLAGTCGVLLLSLVITLYCKRGRKKLLYIFKQPFMRPVQTTQEEDGCSCRFPEEEEGGCELRVKFSRSADAPAYKQGQNQLYNELNLGRREEYDVLDKRRGRDPEMGGKPRRKNPQEGLYNELQKDKMAEAYSEIGMKGERRRGKGHDGLYQGLSTATKDTYDALHMQALPPR

SEQ ID NO: 1529 - protein, 703 aa, synthetic construct
  REGION 1..703: note = Description of Artificial Sequence: Synthetic Chimeric Antigen Receptor
QVQLQQSGAEVKKPGSSVKVSCKASGGTFSSYAISWVRQAPGQGLEWMGGIIPILGIANYAQKFQGRVTITADESTSTAYMELSSLRSEDTAVYYCATGGSGRYALDIWGQGTMVTVSSGGGGSGGGGSGGGGSEIVLTQSPATLSLSPGERATLSCRASQSVSSYLAWYQQKPGQAPRLLIYDASNRATGIPARFSGSGSGTDFTLTISSLEPEDFAVYYCQQRSNWPPSYTFGQGTKLEIKRAEPKSCDKTHTCPPCPAPELLGGPSVFLFPPKPKDTLMISRTPEVTCVVVDVSHEDPEVKFNWYVDGVEVHNAKTKPREEQYNSTYRVVSVLTVLHQDWLNGKEYKCKVSNKALPAPIEKTISKAKGQPREPQVYTLPPSRDELTKNQVSLTCLVKGFYPSDIAVEWESNGQPENNYKTTPPVLDSDGSFFLYSKLTVDKSRWQQGNVFSCSVMHEALHNHYTQKSLSLSPGKKDPKAAAIEVMYPPPYLDNEKSNGTIIHVKGKHLCPSPLFPGPSKPFWVLVVVGGVLACYSLLVTVAFIIFWVRSKRSRLLHSDYMNMTPRRPGPTRKHYQPYAPPRDFAAYRSRVKFSRSADAPAYQQGQNQLYNELNLGRREEYDVLDKRRGRDPEMGGKPRRKNPQEGLYNELQKDKMAEAYSEIGMKGERRRGKGHDGLYQGLSTATKDTYDALHMQALPPR

SEQ ID NO: 1530 - protein, 714 aa, synthetic construct
  REGION 1..714: note = Description of Artificial Sequence: Synthetic Chimeric Antigen Receptor
QVQLQQSGAEVKKPGSSVKVSCKASGGTFSSYAISWVRQAPGQGLEWMGGIIPILGIANYAQKFQGRVTITADESTSTAYMELSSLRSEDTAVYYCARGGAGGSGSYYPLIWGQGTTVTVSSGGGGSGGGGSGGGGSEIVLTQSPATLSLSPGERATLSCGASQSVSSSYLAWYQQKPGQAPRLLIYDASSRATGIPARFSGSGSGTDFTLTISSLEPEDFAVYYCQQRSSWPPTWTFGQGTKLEIKRAEPKSCDKTHTCPPCPAPELLGGPSVFLFPPKPKDTLMISRTPEVTCVVVDVSHEDPEVKFNWYVDGVEVHNAKTKPREEQYNSTYRVVSVLTVLHQDWLNGKEYKCKVSNKALPAPIEKTISKAKGQPREPQVYTLPPSRDELTKNQVSLTCLVKGFYPSDIAVEWESNGQPENNYKTTPPVLDSDGSFFLYSKLTVDKSRWQQGNVFSCSVMHEALHNHYTQKSLSLSPGKKDPKAAAIEGAAAAIEVMYPPPYLDNEKSNGTIIHVKGKHLCPSPLFPGPSKPFWVLVVVGGVLACYSLLVTVAFIIFWVRSKRSRLLHSDYMNMTPRRPGPTRKHYQPYAPPRDFAAYRSRVKFSRSADAPAYQQGQNQLYNELNLGRREEYDVLDKRRGRDPEMGGKPRRKNPQEGLYNELQKDKMAEAYSEIGMKGERRRGKGHDGLYQGLSTATKDTYDALHMQALPPR

SEQ ID NO: 1531 - protein, 701 aa, synthetic construct
  REGION 1..701: note = Description of Artificial Sequence: Synthetic Chimeric Antigen Receptor
QVQLVQSGAEVKKPGSSVKVSCKASGGTFSSYAISWVRQAPGQGLEWMGGIIPILGTANYAQKFQGRVTITADESTSTAYMELSSLRSEDTAVYYCARWGGGAFDIWGQGTMVTVSSGGGGSGGGGSGGGGSEIVLTQSPGTLSLSPGERATLSCRASQSVGGYLAWYQQKPGQAPRLLIYDASNRATGIPARFSGSGSGTDFTLTISSLEPEDFAVYYCQQRNNWPPMYTFGQGTKLEIKRAEPKSCDKTHTCPPCPAPELLGGPSVFLFPPKPKDTLMISRTPEVTCVVVDVSHEDPEVKFNWYVDGVEVHNAKTKPREEQYNSTYRVVSVLTVLHQDWLNGKEYKCKVSNKALPAPIEKTISKAKGQPREPQVYTLPPSRDELTKNQVSLTCLVKGFYPSDIAVEWESNGQPENNYKTTPPVLDSDGSFFLYSKLTVDKSRWQQGNVFSCSVMHEALHNHYTQKSLSLSPGKKDPKAAAIEVMYPPPYLDNEKSNGTIIHVKGKHLCPSPLFPGPSKPFWVLVVVGGVLACYSLLVTVAFIIFWVRSKRSRLLHSDYMNMTPRRPGPTRKHYQPYAPPRDFAAYRSRVKFSRSADAPAYQQGQNQLYNELNLGRREEYDVLDKRRGRDPEMGGKPRRKNPQEGLYNELQKDKMAEAYSEIGMKGERRRGKGHDGLYQGLSTATKDTYDALHMQALPPR

SEQ ID NO: 1532 - protein, 466 aa, synthetic construct
  REGION 1..466: note = Description of Artificial Sequence: Synthetic Chimeric Antigen Receptor
QVQLQQSGAEVKKPGSSVKVSCKASGGTFSSYAISWVRQAPGQGLEWMGGIIPILGIANYAQKFQGRVTITADESTSTAYMELSSLRSEDTAVYYCATGGSGRYALDIWGQGTMVTVSSGGGGSGGGGSGGGGSEIVLTQSPATLSLSPGERATLSCRASQSVSSYLAWYQQKPGQAPRLLIYDASNRATGIPARFSGSGSGTDFTLTISSLEPEDFAVYYCQQRSNWPPSYTFGQGTKLEIKRAAAIEVMYPPPYLDNEKSNGTIIHVKGKHLCPSPLFPGPSKPFWVLVVVGGVLACYSLLVTVAFIIFWVRSKRSRLLHSDYMNMTPRRPGPTRKHYQPYAPPRDFAAYRSRVKFSRSADAPAYQQGQNQLYNELNLGRREEYDVLDKRRGRDPEMGGKPRRKNPQEGLYNELQKDKMAEAYSEIGMKGERRRGKGHDGLYQGLSTATKDTYDALHMQALPPR

SEQ ID NO: 1533 - protein, 470 aa, synthetic construct
  REGION 1..470: note = Description of Artificial Sequence: Synthetic Chimeric Antigen Receptor
QVQLQQSGAEVKKPGSSVKVSCKASGGTFSSYAISWVRQAPGQGLEWMGGIIPILGIANYAQKFQGRVTITADESTSTAYMELSSLRSEDTAVYYCATGGSGRYALDIWGQGTMVTVSSGGGGSGGGGSGGGGSEIVLTQSPATLSLSPGERATLSCRASQSVSSYLAWYQQKPGQAPRLLIYDASNRATGIPARFSGSGSGTDFTLTISSLEPEDFAVYYCQQRSNWPPSYTFGQGTKLEIKRAAATTTPAPRPPTPAPTIASQPLSLRPEACRPAAGGAVHTRGLDFACDIYIWAPLAGTCGVLLLSLVITLYCKRGRKKLLYIFKQPFMRPVQTTQEEDGCSCRFPEEEEGGCELRVKFSRSADAPAYKQGQNQLYNELNLGRREEYDVLDKRRGRDPEMGGKPRRKNPQEGLYNELQKDKMAEAYSEIGMKGERRRGKGHDGLYQGLSTATKDTYDALHMQALPPR

SEQ ID NO: 1534 - protein, 530 aa, synthetic construct
  REGION 1..530: note = Description of Artificial Sequence: Synthetic Chimeric Antigen Receptor
QVQLQQSGAEVKKPGSSVKVSCKASGGTFSSYAISWVRQAPGQGLEWMGGIIPILGIANYAQKFQGRVTITADESTSTAYMELSSLRSEDTAVYYCATGGSGRYALDIWGQGTMVTVSSGGGGSGGGGSGGGGSEIVLTQSPATLSLSPGERATLSCRASQSVSSYLAWYQQKPGQAPRLLIYDASNRATGIPARFSGSGSGTDFTLTISSLEPEDFAVYYCQQRSNWPPSYTFGQGTKLEIKRAAAFVPVFLPAKPTTTPAPRPPTPAPTIASQPLSLRPEACRPAAGGAVHTRGLDFACDIYIWAPLAGTCGVLLLSLVITLYCNHRNRSKRSRLLHSDYMNMTPRRPGPTRKHYQPYAPPRDFAAYRSRFSVVKRGRKKLLYIFKQPFMRPVQTTQEEDGCSCRFPEEEEGGCELRVKFSRSADAPAYQQGQNQLYNELNLGRREEYDVLDKRRGRDPEMGGKPRRKNPQEGLYNELQKDKMAEAYSEIGMKGERRRGKGHDGLYQGLSTATKDTYDALHMQALPPR

SEQ ID NO: 1535 - protein, 470 aa, synthetic construct
  REGION 1..470: note = Description of Artificial Sequence: Synthetic Chimeric Antigen Receptor
QVQLQQSGAEVKKPGSSVKVSCKASGGTFSSYAISWVRQAPGQGLEWMGGIIPILGIANYAQKFQGRVTITADESTSTAYMELSSLRSEDTAVYYCARGGAGGSGSYYPLIWGQGTTVTVSSGGGGSGGGGSGGGGSEIVLTQSPATLSLSPGERATLSCGASQSVSSSYLAWYQQKPGQAPRLLIYDASSRATGIPARFSGSGSGTDFTLTISSLEPEDFAVYYCQQRSSWPPTWTFGQGTKLEIKRAAAIEVMYPPPYLDNEKSNGTIIHVKGKHLCPSPLFPGPSKPFWVLVVVGGVLACYSLLVTVAFIIFWVRSKRSRLLHSDYMNMTPRRPGPTRKHYQPYAPPRDFAAYRSRVKFSRSADAPAYQQGQNQLYNELNLGRREEYDVLDKRRGRDPEMGGKPRRKNPQEGLYNELQKDKMAEAYSEIGMKGERRRGKGHDGLYQGLSTATKDTYDALHMQALPPR

SEQ ID NO: 1536 - protein, 474 aa, synthetic construct
  REGION 1..474: note = Description of Artificial Sequence: Synthetic Chimeric Antigen Receptor
QVQLQQSGAEVKKPGSSVKVSCKASGGTFSSYAISWVRQAPGQGLEWMGGIIPILGIANYAQKFQGRVTITADESTSTAYMELSSLRSEDTAVYYCARGGAGGSGSYYPLIWGQGTTVTVSSGGGGSGGGGSGGGGSEIVLTQSPATLSLSPGERATLSCGASQSVSSSYLAWYQQKPGQAPRLLIYDASSRATGIPARFSGSGSGTDFTLTISSLEPEDFAVYYCQQRSSWPPTWTFGQGTKLEIKRAAATTTPAPRPPTPAPTIASQPLSLRPEACRPAAGGAVHTRGLDFACDIYIWAPLAGTCGVLLLSLVITLYCKRGRKKLLYIFKQPFMRPVQTTQEEDGCSCRFPEEEEGGCELRVKFSRSADAPAYKQGQNQLYNELNLGRREEYDVLDKRRGRDPEMGGKPRRKNPQEGLYNELQKDKMAEAYSEIGMKGERRRGKGHDGLYQGLSTATKDTYDALHMQALPPR

SEQ ID NO: 1537 - protein, 534 aa, synthetic construct
  REGION 1..534: note = Description of Artificial Sequence: Synthetic Chimeric Antigen Receptor
QVQLQQSGAEVKKPGSSVKVSCKASGGTFSSYAISWVRQAPGQGLEWMGGIIPILGIANYAQKFQGRVTITADESTSTAYMELSSLRSEDTAVYYCARGGAGGSGSYYPLIWGQGTTVTVSSGGGGSGGGGSGGGGSEIVLTQSPATLSLSPGERATLSCGASQSVSSSYLAWYQQKPGQAPRLLIYDASSRATGIPARFSGSGSGTDFTLTISSLEPEDFAVYYCQQRSSWPPTWTFGQGTKLEIKRAAAFVPVFLPAKPTTTPAPRPPTPAPTIASQPLSLRPEACRPAAGGAVHTRGLDFACDIYIWAPLAGTCGVLLLSLVITLYCNHRNRSKRSRLLHSDYMNMTPRRPGPTRKHYQPYAPPRDFAAYRSRFSVVKRGRKKLLYIFKQPFMRPVQTTQEEDGCSCRFPEEEEGGCELRVKFSRSADAPAYQQGQNQLYNELNLGRREEYDVLDKRRGRDPEMGGKPRRKNPQEGLYNELQKDKMAEAYSEIGMKGERRRGKGHDGLYQGLSTATKDTYDALHMQALPPR

SEQ ID NO: 1538 - protein, 464 aa, synthetic construct
  REGION 1..464: note = Description of Artificial Sequence: Synthetic Chimeric Antigen Receptor
QVQLVQSGAEVKKPGSSVKVSCKASGGTFSSYAISWVRQAPGQGLEWMGGIIPILGTANYAQKFQGRVTITADESTSTAYMELSSLRSEDTAVYYCARWGGGAFDIWGQGTMVTVSSGGGGSGGGGSGGGGSEIVLTQSPGTLSLSPGERATLSCRASQSVGGYLAWYQQKPGQAPRLLIYDASNRATGIPARFSGSGSGTDFTLTISSLEPEDFAVYYCQQRNNWPPMYTFGQGTKLEIKRAAAIEVMYPPPYLDNEKSNGTIIHVKGKHLCPSPLFPGPSKPFWVLVVVGGVLACYSLLVTVAFIIFWVRSKRSRLLHSDYMNMTPRRPGPTRKHYQPYAPPRDFAAYRSRVKFSRSADAPAYQQGQNQLYNELNLGRREEYDVLDKRRGRDPEMGGKPRRKNPQEGLYNELQKDKMAEAYSEIGMKGERRRGKGHDGLYQGLSTATKDTYDALHMQALPPR

SEQ ID NO: 1539 - protein, 468 aa, synthetic construct
  REGION 1..468: note = Description of Artificial Sequence: Synthetic Chimeric Antigen Receptor
QVQLVQSGAEVKKPGSSVKVSCKASGGTFSSYAISWVRQAPGQGLEWMGGIIPILGTANYAQKFQGRVTITADESTSTAYMELSSLRSEDTAVYYCARWGGGAFDIWGQGTMVTVSSGGGGSGGGGSGGGGSEIVLTQSPGTLSLSPGERATLSCRASQSVGGYLAWYQQKPGQAPRLLIYDASNRATGIPARFSGSGSGTDFTLTISSLEPEDFAVYYCQQRNNWPPMYTFGQGTKLEIKRAAATTTPAPRPPTPAPTIASQPLSLRPEACRPAAGGAVHTRGLDFACDIYIWAPLAGTCGVLLLSLVITLYCKRGRKKLLYIFKQPFMRPVQTTQEEDGCSCRFPEEEEGGCELRVKFSRSADAPAYKQGQNQLYNELNLGRREEYDVLDKRRGRDPEMGGKPRRKNPQEGLYNELQKDKMAEAYSEIGMKGERRRGKGHDGLYQGLSTATKDTYDALHMQALPPR

SEQ ID NO: 1540 - protein, 528 aa, synthetic construct
  REGION 1..528: note = Description of Artificial Sequence: Synthetic Chimeric Antigen Receptor
QVQLVQSGAEVKKPGSSVKVSCKASGGTFSSYAISWVRQAPGQGLEWMGGIIPILGTANYAQKFQGRVTITADESTSTAYMELSSLRSEDTAVYYCARWGGGAFDIWGQGTMVTVSSGGGGSGGGGSGGGGSEIVLTQSPGTLSLSPGERATLSCRASQSVGGYLAWYQQKPGQAPRLLIYDASNRATGIPARFSGSGSGTDFTLTISSLEPEDFAVYYCQQRNNWPPMYTFGQGTKLEIKRAAAFVPVFLPAKPTTTPAPRPPTPAPTIASQPLSLRPEACRPAAGGAVHTRGLDFACDIYIWAPLAGTCGVLLLSLVITLYCNHRNRSKRSRLLHSDYMNMTPRRPGPTRKHYQPYAPPRDFAAYRSRFSVVKRGRKKLLYIFKQPFMRPVQTTQEEDGCSCRFPEEEEGGCELRVKFSRSADAPAYQQGQNQLYNELNLGRREEYDVLDKRRGRDPEMGGKPRRKNPQEGLYNELQKDKMAEAYSEIGMKGERRRGKGHDGLYQGLSTATKDTYDALHMQALPPR

SEQ ID NO: 1541 - protein, 223 aa, synthetic construct
  REGION 1..223: note = Description of Artificial Sequence: Synthetic Chimeric Antigen Receptor
TTTPAPRPPTPAPTIASQPLSLRPEACRPAAGGAVHTRGLDFACDIYIWAPLAGTCGVLLLSLVITLYCKRGRKKLLYIFKQPFMRPVQTTQEEDGCSCRFPEEEEGGCELRVKFSRSADAPAYKQGQNQLYNELNLGRREEYDVLDKRRGRDPEMGGKPRRKNPQEGLYNELQKDKMAEAYSEIGMKGERRRGKGHDGLYQGLSTATKDTYDALHMQALPPR

SEQ ID NO: 1542 - protein, 496 aa, synthetic construct
  REGION 1..496: note = Description of Artificial Sequence: Synthetic Chimeric Antigen Receptor
MVATLLVTSLLLCELPHPAFLLIPDTEVQLVESGGGLVQPGGSLRLSCAASGFTFSSFGMHWVRQAPGKGLEWVAYISSDSSAIYYADTVKGRFTISRDNAKNSLYLQMNSLRDEDTAVYYCGRGRENIYYGSRLDYWGQGTTVTVSSGGGGSGGGGSGGGGSDIQLTQSPSFLSASVGDRVTITCKASQNVDTNVAWYQQKPGKAPKALIYSASYRYSGVPSRFSGSGSGTDFTLTISSLQPEDFATYYCQQYNNYPFTFGQGTKLEIKAAATTTPAPRPPTPAPTIASQPLSLRPEACRPAAGGAVHTRGLDFACDIYIWAPLAGTCGVLLLSLVITLYCKRGRKKLLYIFKQPFMRPVQTTQEEDGCSCRFPEEEEGGCELRVKFSRSADAPAYKQGQNQLYNELNLGRREEYDVLDKRRGRDPEMGGKPRRKNPQEGLYNELQKDKMAEAYSEIGMKGERRRGKGHDGLYQGLSTATKDTYDALHMQALPPR

SEQ ID NO: 1543 - DNA, 726 bp, synthetic construct; identical to SEQ ID NO: 1295
  misc_feature 1..726: note = Description of Artificial Sequence: Synthetic CD19 scFv sequence
  source 1..726: mol_type = other DNA

SEQ ID NO: 1544 - DNA, 726 bp, synthetic construct; identical to SEQ ID NO: 1296
  misc_feature 1..726: note = Description of Artificial Sequence: Synthetic CD19 scFv sequence
  source 1..726: mol_type = other DNA

SEQ ID NO: 1545 - DNA, 726 bp, synthetic construct; identical to SEQ ID NO: 1297
  misc_feature 1..726: note = Description of Artificial Sequence: Synthetic CD19 scFv sequence
  source 1..726: mol_type = other DNA

SEQ ID NO: 1546 - DNA, 726 bp, synthetic construct; identical to SEQ ID NO: 1298
  misc_feature 1..726: note = Description of Artificial Sequence: Synthetic CD19 scFv sequence
  source 1..726: mol_type = other DNA

SEQ ID NO: 1547 - DNA, 726 bp, synthetic construct; identical to SEQ ID NO: 1299
  misc_feature 1..726: note = Description of Artificial Sequence: Synthetic CD19 scFv sequence
  source 1..726: mol_type = other DNA

SEQ ID NO: 1548 - protein, 69 aa, Homo sapiens; identical to SEQ ID NO: 607

SEQ ID NO: 1549 - DNA, 207 bp, synthetic construct
  misc_feature 1..207: note = Description of Artificial Sequence: Synthetic construct
  source 1..207: mol_type = other DNA
accacaaccccagcacctcgcccaccaacaccagcaccaaccatcgcatcccagccactgtctctgaggcccgaggcatgtaggcctgcagcaggaggcgccgtgcacaccaggggcctggactttgcctgcgatatctatatctgggcaccactggcaggaacatgtggcgtgctgctgctgtccctggtcatcaccctgtattgc

SEQ ID NO: 1550 - DNA, 207 bp, Homo sapiens; identical to SEQ ID NO: 1301
  source 1..207: mol_type = other DNA

SEQ ID NO: 1551 - DNA, 207 bp, synthetic construct
  misc_feature 1..207: note = Description of Artificial Sequence: Synthetic construct
  source 1..207: mol_type = other DNA
acaacaaccccagcacccagacctccaacacctgcaccaaccatcgcaagccagcctctgtccctgaggcccgaggcatgtaggccagcagcaggaggcgccgtgcacacccggggcctggactttgcctgcgatatctatatctgggcaccactggcaggaacatgtggcgtgctgctgctgtccctggtcatcaccctgtattgc

SEQ ID NO: 1552 - DNA, 207 bp, synthetic construct
  misc_feature 1..207: note = Description of Artificial Sequence: Synthetic construct
  source 1..207: mol_type = other DNA
accacaaccccagcaccccgcccaccaacacctgcaccaaccatcgcctcccagccactgtctctgaggcccgaggcatgtaggcctgcagcaggaggcgccgtgcacaccaggggcctggactttgcctgcgatatctacatctgggcacctctggcaggaacatgtggcgtgctgctgctgtccctggtcatcaccctgtattgc

SEQ ID NO: 1553 - DNA, 207 bp, synthetic construct
  misc_feature 1..207: note = Description of Artificial Sequence: Synthetic construct
  source 1..207: mol_type = other DNA
accacgacgccagcgccgcgaccaccaacaccggcgcccaccatcgcgtcgcagcccctgtccctgcgcccagaggcgtgccggccagcggcggggggcgcagtgcacacgagggggctggacttcgcctgtgatatctacatctgggcgcccttggccgggacttgtggggtccttctcctgtcactggttatcaccctttactgc

SEQ ID NO: 1554 - DNA, 135 bp, synthetic construct; identical to SEQ ID NO: 1303
  misc_feature 1..135: note = Description of Artificial Sequence: Synthetic construct
  source 1..135: mol_type = other DNA

SEQ ID NO: 1555 - DNA, 135 bp, synthetic construct; identical to SEQ ID NO: 1304
  misc_feature 1..135: note = Description of Artificial Sequence: Synthetic construct
  source 1..135: mol_type = other DNA

SEQ ID NO: 1556 - DNA, 135 bp, synthetic construct; identical to SEQ ID NO: 1305
  misc_feature 1..135: note = Description of Artificial Sequence: Synthetic construct
  source 1..135: mol_type = other DNA

SEQ ID NO: 1557 - DNA, 135 bp, synthetic construct; identical to SEQ ID NO: 1306
  misc_feature 1..135: note = Description of Artificial Sequence: Synthetic construct
  source 1..135: mol_type = other DNA

SEQ ID NO: 1558 - DNA, 135 bp, synthetic construct; identical to SEQ ID NO: 1307
  misc_feature 1..135: note = Description of Artificial Sequence: Synthetic construct
  source 1..135: mol_type = other DNA

SEQ ID NO: 1559 - DNA, 336 bp, synthetic construct
  misc_feature 1..336: note = Description of Artificial Sequence: Synthetic construct
  source 1..336: mol_type = other DNA
agggtgaagttttctaggagcgccgatgcaccagcatataagcagggacagaaccagctgtacaacgagctgaatctgggcaggagagaggagtacgacgtgctggataagaggaggggaagggaccccgagatgggaggcaagccaaggagaaagaacccccaggagggcctgtataatgagctgcagaaggacaagatggccgaggcctactccgagatcggcatgaagggagagcggcgcaggggcaagggacacgatggcctgtatcagggcctgtctacagccaccaaggacacctacgatgcactgcacatgcaggccctgcctccaagg

SEQ ID NO: 1560 - DNA, 336 bp, synthetic construct
  misc_feature 1..336: note = Description of Artificial Sequence: Synthetic construct
  source 1..336: mol_type = other DNA
agggtgaagttttccaggtctgccgatgcccccgcctataagcagggccagaatcagctgtacaacgagctgaatctgggcaggagagaggagtacgacgtgctggataagaggaggggacgcgaccccgagatgggaggcaagcctaggagaaagaacccacaggagggcctgtataatgagctgcagaaggacaagatggccgaggcctactctgagatcggcatgaagggagagcggcgcaggggcaagggacacgatggcctgtatcagggcctgagcacagccaccaaggacacctacgatgcactgcacatgcaggccctgccacctagg

SEQ ID NO: 1561 - DNA, 336 bp, synthetic construct
  misc_feature 1..336: note = Description of Artificial Sequence: Synthetic construct
  source 1..336: mol_type = other DNA
agggtgaagtttagcaggtccgccgatgccccagcctataagcagggccagaaccagctgtacaacgagctgaatctgggcaggagggaagagtacgacgtgctggataagaggagaggaagggaccccgagatgggaggcaagccaaggaggaagaacccacaggagggcctgtataatgagctgcagaaggacaagatggccgaggcctacagcgagatcggcatgaagggagagaggagacggggcaagggacacgatggcctgtatcagggcctgtccacagccaccaaggacacctacgatgcactgcacatgcaggccctgcctccaagg

SEQ ID NO: 1562 - DNA, 336 bp, synthetic construct
  misc_feature 1..336: note = Description of Artificial Sequence: Synthetic construct
  source 1..336: mol_type = other DNA
agggtgaagttttccaggtctgccgatgccccagcctataagcagggccagaatcagctgtacaacgagctgaatctgggcaggagagaggagtacgacgtgctggataagaggaggggacgcgaccccgagatgggaggcaagcctaggagaaagaacccacaggagggcctgtataatgagctgcagaaggacaagatggccgaggcctactctgagatcggcatgaagggagagcggcgcaggggcaagggacacgatggcctgtatcagggcctgagcacagccaccaaggacacctacgatgcactgcacatgcaggccctgccacctagg

SEQ ID NO: 1563 - DNA, 336 bp, synthetic construct
  misc_feature 1..336: note = Description of Artificial Sequence: Synthetic construct
  source 1..336: mol_type = other DNA
agggtgaagtttagcaggtccgccgatgccccagcctataagcagggccagaaccagctgtacaacgagctgaatctgggcaggagggaagagtacgacgtgctggataagaggagaggaagggaccccgagatgggaggcaagccaaggaggaagaacccacaggagggcctgtataatgagctgcagaaggacaagatggccgaggcctactccgagatcggcatgaagggagagaggagacggggcaagggacacgatggcctgtatcagggcctgtctacagccaccaaggacacctacgatgcactgcacatgcaggccctgcctccaagg

SEQ ID NO: 1564 - DNA, 336 bp, synthetic construct
  misc_feature 1..336: note = Description of Artificial Sequence: Synthetic construct
  source 1..336: mol_type = other DNA
agagtgaagttcagcaggagcgcagacgcccccgcgtacaagcagggccagaaccagctctataacgagctcaatctaggacgaagagaggagtacgatgttttggacaagagacgtggccgggaccctgagatggggggaaagccgagaaggaagaaccctcaggaaggcctgtacaatgaactgcagaaagataagatggcggaggcctacagtgagattgggatgaaaggcgagcgccggaggggcaaggggcacgatggcctttaccagggtctcagtacagccaccaaggacacctacgacgcccttcacatgcaggccctgccccctcgc

SEQ ID NO: 1565 - DNA, 126 bp, synthetic construct; identical to SEQ ID NO: 1315
  misc_feature 1..126: note = Description of Artificial Sequence: Synthetic construct
  source 1..126: mol_type = other DNA

SEQ ID NO: 1566 - DNA, 126 bp, synthetic construct; identical to SEQ ID NO: 1316
  misc_feature 1..126: note = Description of Artificial Sequence: Synthetic construct
  source 1..126: mol_type = other DNA

SEQ ID NO: 1567 - DNA, 126 bp, synthetic construct; identical to SEQ ID NO: 1317
  misc_feature 1..126: note = Description of Artificial Sequence: Synthetic construct
  source 1..126: mol_type = other DNA

SEQ ID NO: 1568 - DNA, 126 bp, synthetic construct; identical to SEQ ID NO: 1318
  misc_feature 1..126: note = Description of Artificial Sequence: Synthetic construct
  source 1..126: mol_type = other DNA

SEQ ID NO: 1569 - DNA, 126 bp, synthetic construct; identical to SEQ ID NO: 1319
  misc_feature 1..126: note = Description of Artificial Sequence: Synthetic construct
  source 1..126: mol_type = other DNA

SEQ ID NO: 1570 - DNA, 126 bp, synthetic construct
  misc_feature 1..126: note = Description of Artificial Sequence: Synthetic construct
  source 1..126: mol_type = other DNA
aaacggggcagaaagaaactcctgtatatattcaaacaaccatttatgagaccagtacaaactactcaagaggaagatggctgtagctgccgatttccagaagaagaagaaggaggatgtgaactg

SEQ ID NO: 1571 - DNA, 72 bp, synthetic construct
  misc_feature 1..72: note = Description of Artificial Sequence: Synthetic construct
  source 1..72: mol_type = other DNA
atctacatctgggcaccactggcaggaacatgcggcgtgctgctgctgtccctggtcatcaccctgtattgt

SEQ ID NO: 1572 - DNA, 72 bp, synthetic construct
  misc_feature 1..72: note = Description of Artificial Sequence: Synthetic construct
  source 1..72: mol_type = other DNA
atctacatctgggcacctctggcaggaacatgcggcgtgctgctgctgtctctggtcatcaccctgtattgt

SEQ ID NO: 1573 - protein, 21 aa, Homo sapiens
MALPVTALLLPLALLLHAARP

SEQ ID NO: 1574 - DNA, 63 bp, Homo sapiens; identical to SEQ ID NO: 1321
  source 1..63: mol_type = other DNA

SEQ ID NO: 1575 - DNA, 63 bp, synthetic construct; identical to SEQ ID NO: 1322
  misc_feature 1..63: note = Description of Artificial Sequence: Synthetic signal sequence
  source 1..63: mol_type = other DNA

SEQ ID NO: 1576 - DNA, 63 bp, synthetic construct; identical to SEQ ID NO: 1323
  misc_feature 1..63: note = Description of Artificial Sequence: Synthetic signal sequence
  source 1..63: mol_type = other DNA

SEQ ID NO: 1577 - DNA, 63 bp, synthetic construct; identical to SEQ ID NO: 1324
  misc_feature 1..63: note = Description of Artificial Sequence: Synthetic signal sequence
  source 1..63: mol_type = other DNA

SEQ ID NO: 1578 - DNA, 63 bp, synthetic construct; identical to SEQ ID NO: 1325
  misc_feature 1..63: note = Description of Artificial Sequence: Synthetic signal sequence
  source 1..63: mol_type = other DNA

SEQ ID NO: 1579 - protein, 22 aa, Homo sapiens
MCHQQLVISWFSLVFLASPLVA

SEQ ID NO: 1580 - DNA, 66 bp, Homo sapiens
  source 1..66: mol_type = other DNA
atgtgtcaccagcagttggtcatctcttggttttccctggtttttctggcatctcccctcgtggcc

SEQ ID NO: 1581 - DNA, 66 bp, synthetic construct
  misc_feature 1..66: note = Description of Artificial Sequence: Synthetic signal sequence
  source 1..66: mol_type = other DNA
atgtgccaccagcagctggtcatcagctggttctccctggtgtttctggcatcccctctggtggca

SEQ ID NO: 1582 - DNA, 66 bp, synthetic construct
  misc_feature 1..66: note = Description of Artificial Sequence: Synthetic signal sequence
  source 1..66: mol_type = other DNA
atgtgccaccagcagctggtcatcagctggttctccctggtgtttctggccagccctctggtggcc

SEQ ID NO: 1583 - DNA, 66 bp, synthetic construct
  misc_feature 1..66: note = Description of Artificial Sequence: Synthetic signal sequence
  source 1..66: mol_type = other DNA
atgtgccaccagcagctggtcatcagctggttctccctggtgtttctggcaagccctctggtggca

SEQ ID NO: 1584 - DNA, 66 bp, synthetic construct
  misc_feature 1..66: note = Description of Artificial Sequence: Synthetic signal sequence
  source 1..66: mol_type = other DNA
atgtgccaccagcagctggtcatcagctggttctccctggtgtttctggcatccccactggtggca

SEQ ID NO: 1585 - DNA, 66 bp, synthetic construct
  misc_feature 1..66: note = Description of Artificial Sequence: Synthetic signal sequence
  source 1..66: mol_type = other DNA
atgtgccaccaacagctcgtgatcagctggttctccctggtgttcctggctagccccctggtggcc

SEQ ID NO: 1586 - DNA, 66 bp, synthetic construct
  misc_feature 1..66: note = Description of Artificial Sequence: Synthetic signal sequence
  source 1..66: mol_type = other DNA
atgtgccaccagcagctggtcatctcttggttcagcctggtgtttctggcctcccccctggtggcc

SEQ ID NO: 1587 - DNA, 66 bp, synthetic construct
  misc_feature 1..66: note = Description of Artificial Sequence: Synthetic signal sequence
  source 1..66: mol_type = other DNA
atgtgccaccagcagctggtcatctcctggttctctctggtgtttctggcatctcctctggtggca

SEQ ID NO: 1588 - DNA, 66 bp, synthetic construct
  misc_feature 1..66: note = Description of Artificial Sequence: Synthetic signal sequence
  source 1..66: mol_type = other DNA
atgtgccaccagcagctggtcatctcttggttcagcctggtgtttctggcatccccactggtggca

SEQ ID NO: 1589 - protein, 306 aa, synthetic construct; identical to SEQ ID NO: 734
  REGION 1..306: note = Description of Artificial Sequence: Synthetic payload sequence

SEQ ID NO: 1590 - DNA, 918 bp, synthetic construct
  misc_feature 1..918: note = Description of Artificial Sequence: Synthetic payload sequence
  source 1..918: mol_type = other DNA
atctgggagctgaagaaggacgtgtacgtggtggagctggactggtatcccgatgcccctggcgagatggtggtgctgacctgcgacacacctgaggaggatggcatcacctggacactggatcagagctccgaggtgctgggaagcggcaagaccctgacaatccaggtgaaggagttcggcgacgccggccagtacacatgtcacaagggcggcgaggtgctgtctcacagcctgctgctgctgcacaagaaggaggacggcatttggtccacagacatcctgaaggatcagaaggagccaaagaacaagaccttcctgcggtgcgaggccaagaattatagcggccggttcacctgttggtggctgaccacaatcagcaccgatctgacattttccgtgaagtctagccggggctcctctgacccacagggagtgacatgcggagcagccaccctgtccgccgagcgggtgagaggcgataacaaggagtacgagtattccgtggagtgccaggaggactctgcctgtcctgcagcagaggagagcctgccaatcgaagtgatggtggatgccgtgcacaagctgaagtacgagaattatacaagctccttctttatcagggacatcatcaagcctgatccccctaagaacctgcagctgaagccactgaagaattctcgccaggtggaggtgagctgggagtacccagacacctggtccacaccccactcttatttcagcctgaccttttgcgtgcaggtgcagggcaagtccaagcgggagaagaaggacagagtgttcaccgataagacatctgccaccgtgatctgtcggaagaacgcctccatctctgtgagggcccaggatcgctactattctagctcctggagcgagtgggcatccgtgccatgttct

SEQ ID NO: 1591 - DNA, 918 bp, synthetic construct
  misc_feature 1..918: note = Description of Artificial Sequence: Synthetic payload sequence
  source 1..918: mol_type = other DNA
atctgggagctcaagaaagacgtgtacgtggtggaactggactggtaccccgacgcccctggcgaaatggtggtgctgacatgcgacacccctgaggaggatggcattacctggaccctcgatcagagctccgaggtgctgggcagcggcaaaaccctgaccatccaggtgaaggagtttggcgatgccggccagtacacatgtcacaagggcggcgaggtgctgagccactccctgctgctgctccacaagaaggaagatggcatctggagcaccgacattctgaaggatcagaaggagcccaagaacaagacattcctgaggtgtgaggccaagaactacagcggcaggtttacctgctggtggctgacaacaatcagcaccgacctcacattctccgtcaagtcctccaggggttcttccgaccctcaaggcgtgacatgcggcgctgccaccctgagcgctgagagagtcaggggcgacaacaaggagtacgagtacagcgtcgaatgtcaggaggacagcgcctgtcccgccgctgaagagagcctgcctatcgaggtgatggtggacgccgtgcacaaactgaagtatgagaattacacctccagcttcttcatcagggacatcatcaaacccgatccccccaagaacctgcagctgaagcctctgaagaacagcagacaggtcgaagtgtcctgggagtaccctgatacctggtccacaccccacagctacttcagcctgaccttttgcgtgcaggtgcagggcaagagcaaaagggagaagaaggacagggtgtttaccgacaagacctccgccacagtgatttgcagaaagaacgcctccatcagcgtgagggcccaggacaggtattacagcagctcctggagcgaatgggctagcgtgccctgtagc

SEQ ID NO: 1592 - DNA, 918 bp, synthetic construct; identical to SEQ ID NO: 1591
  misc_feature 1..918: note = Description of Artificial Sequence: Synthetic payload sequence
  source 1..918: mol_type = other DNA

SEQ ID NO: 1593 - DNA, 921 bp, synthetic construct
  misc_feature 1..921: note = Description of Artificial Sequence: Synthetic payload sequence
  source 1..921: mol_type = other DNA
atatgggaactgaagaaagatgtttatgtcgtagaattggattggtatccggatgcccctggagaaatggtggtcctcacctgtgacacccctgaagaagatggtatcacctggaccttggaccagagcagtgaggtcttaggctctggcaaaaccctgaccatccaagtcaaagagtttggagatgctggccagtacacctgtcacaaaggaggcgaggttctaagccattcgctcctgctgcttcacaaaaaggaagatggaatttggtccactgatattttaaaggaccagaaagaacccaaaaataagacctttctaagatgcgaggccaagaattattctggacgtttcacctgctggtggctgacgacaatcagtactgatttgacattcagtgtcaaaagcagcagaggctcttctgacccccaaggggtgacgtgcggagctgctacactctctgcagagagagtcagaggggacaacaaggagtatgagtactcagtggagtgccaggaggacagtgcctgcccagctgctgaggagagtctgcccattgaggtcatggtggatgccgttcacaagctcaagtatgaaaactacaccagcagcttcttcatcagggacatcatcaaacctgacccacccaagaacttgcagctgaagccattaaagaattctcggcaggtggaggtcagctgggagtaccctgacacctggagtactccacattcctacttctccctgacattctgcgttcaggtccagggcaagagcaagagagaaaagaaagatagagtcttcacggacaagacctcagccacggtcatctgccgcaaaaatgccagcattagcgtgcgggcccaggaccgctactatagctcatcttggagcgaatgggcatctgtgccctgcagttag

SEQ ID NO: 1594 - DNA, 918 bp, synthetic construct
  misc_feature 1..918: note = Description of Artificial Sequence: Synthetic payload sequence
  source 1..918: mol_type = other DNA
atctgggagctgaagaaggacgtgtacgtggtggagctggactggtatcccgatgcccctggcgagatggtggtgctgacctgcgacacacctgaggaggatggcatcacctggacactggatcagtctagcgaggtgctgggcagcggcaagaccctgacaatccaggtgaaggagttcggcgacgccggccagtacacatgtcacaagggcggcgaggtgctgtctcacagcctgctgctgctgcacaagaaggaggacggcatttggtccacagacatcctgaaggatcagaaggagccaaagaacaagaccttcctgcggtgcgaggccaagaattatagcggccggttcacctgttggtggctgaccacaatcagcaccgatctgacattttccgtgaagtcctctaggggcagctccgacccccagggcgtgacatgcggagcagccaccctgtccgccgagagggtgcgcggcgataacaaggagtacgagtattccgtggagtgccaggaggactctgcctgtccagcagcagaggagagcctgcctatcgaagtgatggtggatgccgtgcacaagctgaagtacgagaattatacatctagcttctttatccgggacatcatcaagcccgatccacccaagaacctgcagctgaagcctctgaagaattctagacaggtggaggtgagctgggagtacccagacacctggtccacaccccactcttatttcagcctgaccttttgcgtgcaggtgcagggcaagagcaagagggagaagaaggaccgcgtgttcaccgataagacatccgccaccgtgatctgtaggaagaacgcctccatctctgtgagggcccaggatcgctactattcctctagctggtccgagtgggcctctgtgccctgtagc

SEQ ID NO: 1595 - DNA, 918 bp, synthetic construct
  misc_feature 1..918: note = Description of Artificial Sequence: Synthetic payload sequence
  source 1..918: mol_type = other DNA
atctgggagctgaagaaggacgtgtacgtggtggagctggactggtatcccgatgcccctggcgagatggtggtgctgacctgcgacacaccagaggaggatggcatcacctggacactggatcagtctagcgaggtgctgggcagcggcaagaccctgacaatccaggtgaaggagttcggcgacgccggccagtacacatgtcacaagggcggcgaggtgctgtctcacagcctgctgctgctgcacaagaaggaggacggcatttggtccacagacatcctgaaggatcagaaggagccaaagaacaagaccttcctgcggtgcgaggccaagaattatagcggccggttcacctgttggtggctgaccacaatcagcaccgatctgacattttccgtgaagtcctctaggggcagctccgacccccagggcgtgacatgcggagcagccaccctgtccgccgagagggtgcgcggcgataacaaggagtacgagtattccgtggagtgccaggaggactctgcctgtccagcagcagaggagagcctgcctatcgaagtgatggtggatgccgtgcacaagctgaagtacgagaattatacatctagcttctttatccgggacatcatcaagcccgatccacccaagaacctgcagctgaagcctctgaagaattctagacaggtggaggtgagctgggagtacccagacacctggtccacaccccactcttatttcagcctgaccttttgcgtgcaggtgcagggcaagtccaagagggagaagaaggaccgcgtgttcaccgataagacatctgccaccgtgatctgtaggaagaacgcctccatctctgtgagggcccaggatcgctactattcctctagctggtccgagtgggcctctgtgccctgtagc

SEQ ID NO: 1596 - DNA, 918 bp, synthetic construct
  misc_feature 1..918: note = Description of Artificial Sequence: Synthetic payload sequence
  source 1..918: mol_type = other DNA
atctgggagctgaagaaggacgtgtacgtggtggagctggactggtatcccgatgcccctggcgagatggtggtgctgacctgcgacacacctgaggaggatggcatcacctggacactggatcagtctagcgaggtgctgggctccggcaagaccctgacaatccaggtgaaggagttcggcgacgccggccagtacacatgtcacaagggcggcgaggtgctgtctcacagcctgctgctgctgcacaagaaggaggacggcatctggtccacagacatcctgaaggatcagaaggagccaaagaacaagaccttcctgaggtgcgaggccaagaattatagcggccgctttacctgttggtggctgaccacaatcagcaccgatctgacattttccgtgaagtcctctaggggcagctccgacccccagggcgtgacatgcggagcagccaccctgtccgccgagcgggtgagaggcgataacaaggagtacgagtattccgtggagtgccaggaggactctgcctgtccagcagcagaggagagcctgcctatcgaagtgatggtggatgccgtgcacaagctgaagtacgagaattatacatctagcttctttatcagggacatcatcaagcccgatccacccaagaacctgcagctgaagcctctgaagaattctcgccaggtggaggtgagctgggagtacccagacacctggagcacaccccactcttatttcagcctgaccttttgcgtgcaggtgcagggcaagtctaagcgggagaagaaggacagagtgttcaccgataagacaagcgccaccgtgatctgtcggaagaacgcctccatctctgtgcgggcccaggatagatactattcctctagctggtccgagtgggcctctgtgccctgtagc

SEQ ID NO: 1597 - DNA, 918 bp, synthetic construct
  misc_feature 1..918: note = Description of Artificial Sequence: Synthetic payload sequence
  source 1..918: mol_type = other DNA
atctgggagctgaagaaggacgtgtacgtggtggagctggactggtatcccgatgcccctggcgagatggtggtgctgacctgcgacacacctgaggaggatggcatcacctggacactggatcagagctccgaggtgctgggaagcggcaagaccctgacaatccaggtgaaggagttcggcgacgccggccagtacacatgtcacaagggcggcgaggtgctgtctcacagcctgctgctgctgcacaagaaggaggacggcatttggtccacagacatcctgaaggatcagaaggagccaaagaacaagaccttcctgaggtgcgaggccaagaattatagcggccgctttacctgttggtggctgaccacaatcagcaccgatctgacattttccgtgaagtctagcagaggctcctctgacccccagggcgtgacatgcggagcagccaccctgtccgccgagcgggtgagaggcgataacaaggagtacgagtattccgtggagtgccaggaggactctgcctgtcctgcagcagaggagagcctgccaatcgaagtgatggtggatgccgtgcacaagctgaagtacgagaattatacaagctccttctttatcagggacatcatcaagcctgatccccctaagaacctgcagctgaagccactgaagaattctcgccaggtggaggtgagctgggagtacccagacacctggtccacaccccactcttatttcagcctgaccttttgcgtgcaggtgcagggcaagagcaagagggagaagaaggaccgcgtgttcaccgataagacatccgccaccgtgatctgtcggaagaacgcctccatctctgtgcgggcccaggatagatactattctagctcctggtccgagtgggcctctgtgccctgtagc

SEQ ID NO: 1598 - DNA, 918 bp, synthetic construct; identical to SEQ ID NO: 1590
  misc_feature 1..918: note = Description of Artificial Sequence: Synthetic payload sequence
  source 1..918: mol_type = other DNA

SEQ ID NO: 1599 - DNA, 918 bp, synthetic construct; identical to SEQ ID NO: 1591
  misc_feature 1..918: note = Description of Artificial Sequence: Synthetic payload sequence
  source 1..918: mol_type = other DNA

SEQ ID NO: 1600 - DNA, 918 bp, synthetic construct
  misc_feature 1..918: note = Description of Artificial Sequence: Synthetic payload sequence
  source 1..918: mol_type = other DNA
atctgggagctgaagaaggacgtgtacgtggtggagctggactggtatcccgatgcccctggcgagatggtggtgctgacctgcgacacacccgaggaggatggcatcacctggacactggatcagtctagcgaggtgctgggctccggcaagaccctgacaatccaggtgaaggagttcggcgacgccggccagtacacctgtcacaagggcggcgaggtgctgtcccactctctgctgctgctgcacaagaaggaggacggcatctggtctacagacatcctgaaggatcagaaggagcctaagaacaagaccttcctgcggtgcgaggccaagaattatagcggccggttcacctgttggtggctgaccacaatcagcaccgatctgacattttccgtgaagtcctctcggggcagctccgacccacagggagtgacatgcggagcagccaccctgtccgccgagagggtgcgcggcgataacaaggagtacgagtattccgtggagtgccaggaggactctgcctgtccagcagcagaggagagcctgccaatcgaagtgatggtggatgccgtgcacaagctgaagtacgagaattatacatctagcttctttatccgggacatcatcaagcccgatccccctaagaacctgcagctgaagcctctgaagaattctagacaggtggaggtgagctgggagtaccccgacacctggagcacacctcacagctatttctccctgaccttttgcgtgcaggtgcagggcaagtccaagagggagaagaaggaccgcgtgttcaccgataagacatctgccaccgtgatctgtcggaagaacgccagcatctccgtgagggcccaggatcgctactattcctctagctggtctgagtgggccagcgtgccctgttcc

SEQ ID NO: 1601 - DNA, 918 bp, synthetic construct
  misc_feature 1..918: note = Description of Artificial Sequence: Synthetic payload sequence
  source 1..918: mol_type = other DNA
atctgggagctgaagaaggacgtgtacgtggtggagctggactggtatcctgatgccccaggcgagatggtggtgctgacatgcgacacccccgaggaggatggcatcacatggaccctggatcagtcctctgaggtgctgggctccggcaagacactgaccatccaggtgaaggagttcggcgacgccggccagtacacctgtcacaagggaggagaggtgctgagccactccctgctgctgctgcacaagaaggaggacggcatctggtccaccgacatcctgaaggatcagaaggagcccaagaacaagacattcctgagatgcgaggccaagaattatagcggcaggtttacctgttggtggctgacaaccatctccacagatctgaccttttctgtgaagagctcccggggctctagcgaccctcagggagtgacctgcggagcagccacactgtccgccgagcgggtgagaggcgataacaaggagtacgagtattccgtggagtgccaggaggactctgcctgtcctgcagcagaggagagcctgccaatcgaagtgatggtggatgccgtgcacaagctgaagtacgagaattatacctcctctttctttatcagagacatcatcaagccagatcctccaaagaacctgcagctgaagcccctgaagaatagcaggcaggtggaggtgtcctgggagtacccagacacatggagcaccccccacagctatttctccctgacattttgcgtgcaggtgcagggcaagtccaagcgcgagaagaaggaccgggtgttcacagataagacctctgccacagtgatctgtcgcaagaacgcctctatcagcgtgcgcgcccaggatcggtactatagctcctcttggtctgagtgggccagcgtgccttgttcc

SEQ ID NO: 1602 - DNA, 918 bp, synthetic construct
  misc_feature 1..918: note = Description of Artificial Sequence: Synthetic payload sequence
  source 1..918: mol_type = other DNA
atctgggagctgaagaaggacgtgtacgtggtggagctggactggtatcccgatgcccctggcgagatggtggtgctgacctgcgacacacctgaggaggatggcatcacctggacactggatcagagctccgaggtgctgggcagcggcaagaccctgacaatccaggtgaaggagttcggcgacgccggccagtacacatgtcacaagggcggcgaggtgctgtctcacagcctgctgctgctgcacaagaaggaggacggcatctggtccacagacatcctgaaggatcagaaggagccaaagaacaagaccttcctgaggtgcgaggccaagaattattctggcaggttcacctgttggtggctgaccacaatcagcaccgatctgacattttccgtgaagtctagccggggctcctctgacccccagggagtgacatgcggagcagccaccctgtccgccgagagggtgagaggcgataacaaggagtacgagtattccgtggagtgccaggaggactctgcctgtcctgcagcagaggagagcctgccaatcgaagtgatggtggatgccgtgcacaagctgaagtacgagaattatacaagctccttctttatcagggacatcatcaagcctgatccccctaagaacctgcagctgaagccactgaagaattctagacaggtggaggtgagctgggagtacccagacacctggagcacaccccactcctatttctctctgaccttttgcgtgcaggtgcagggcaagagcaagagggagaagaaggacagagtgttcaccgataagacatccgccaccgtgatctgtcggaagaacgcctccatctctgtgcgggcccaggatcgctactattctagctcctggagcgagtgggcatccgtgccatgttct

SEQ ID NO: 1603 - protein, 197 aa, synthetic construct; identical to SEQ ID NO: 735
  REGION 1..197: note = Description of Artificial Sequence: Synthetic payload sequence

SEQ ID NO: 1604 - DNA, 594 bp, synthetic construct
  misc_feature 1..594: note = Description of Artificial Sequence: Synthetic payload sequence
  source 1..594: mol_type = other DNA
agaaacctccccgtggccactccagacccaggaatgttcccatgccttcaccactcccaaaacctgctgagggccgtcagcaacatgctccagaaggccagacaaactctagaattttacccttgcacttctgaagagattgatcatgaagatatcacaaaagataaaaccagcacagtggaggcctgtttaccattggaattaaccaagaatgagagttgcctaaattccagagagacctctttcataactaatgggagttgcctggcctccagaaagacctcttttatgatggccctgtgccttagtagtatttatgaagacttgaagatgtaccaggtggagttcaagaccatgaatgcaaagcttctgatggatcctaagaggcagatctttctagatcaaaacatgctggcagttattgatgagctgatgcaggccctgaatttcaacagtgagactgtgccacaaaaatcctcccttgaagaaccggatttttataaaactaaaatcaagctctgcatacttcttcatgctttcagaattcgggcagtgactattgatagagtgatgagctatctgaatgcttcctaa

SEQ ID NO: 1605 - DNA, 594 bp, synthetic construct
  misc_feature 1..594: note = Description of Artificial Sequence: Synthetic payload sequence
  source 1..594: mol_type = other DNA
cgcaatctgccagtggccacccctgacccaggcatgttcccctgcctgcaccacagccagaacctgctgagggccgtgtccaatatgctgcagaaggcccgccagacactggagttttacccttgtacctctgaggagatcgaccacgaggatatcacaaaggataagaccagcacagtggaggcctgcctgccactggagctgaccaagaacgagtcctgtctgaacagccgggaaaccagcttcatcaccaacggctcctgcctggcctctcgcaagaccagcttcatgatggccctgtgcctgtcctctatctacgaggacctgaagatgtatcaggtggagttcaagaccatgaacgccaagctgctgatggaccctaagcggcagatctttctggatcagaatatgctggccgtgatcgacgagctgatgcaggccctgaacttcaatagcgagacagtgccacagaagagctccctggaggagcccgatttctacaagaccaagatcaagctgtgcatcctgctgcacgcctttcggatcagagccgtgaccatcgacagagtgatgtcctatctgaatgcctcttga

SEQ ID NO: 1606 - DNA, 594 bp, synthetic construct
  misc_feature 1..594: note = Description of Artificial Sequence: Synthetic payload sequence
  source 1..594: mol_type = other DNA
cgcaatctgccagtggccacccctgacccaggcatgttcccctgcctgcaccacagccagaacctgctgagggccgtgtccaatatgctgcagaaggcccgccagacactggagttttacccttgtaccagcgaggagatcgaccacgaggatatcacaaaggataagacctccacagtggaggcctgcctgccactggagctgaccaagaacgagtcctgtctgaacagccgggaaaccagcttcatcaccaacggctcctgcctggcctctcgcaagaccagcttcatgatggccctgtgcctgtcctctatctacgaggacctgaagatgtatcaggtggagttcaagaccatgaacgccaagctgctgatggaccctaagcggcagatctttctggatcagaatatgctggccgtgatcgacgagctgatgcaggccctgaacttcaatagcgagacagtgccacagaagagctccctggaggagcccgatttctacaagaccaagatcaagctgtgcatcctgctgcacgcctttcggatcagagccgtgaccatcgacagagtgatgtcctatctgaatgcctcttga

SEQ ID NO: 1607 - DNA, 594 bp, synthetic construct
  misc_feature 1..594: note = Description of Artificial Sequence: Synthetic payload sequence
  source 1..594: mol_type = other DNA
agaaatctgccagtggccacccctgacccaggcatgttcccctgcctgcaccactctcagaacctgctgcgggccgtgagcaatatgctgcagaaggccagacagacactggagttttacccttgtacctccgaggagatcgaccacgaggatatcacaaaggataagacctctacagtggaggcctgcctgccactggagctgaccaagaacgagtcctgtctgaacagccgggaaaccagcttcatcaccaacggctcctgcctggcctctagaaagaccagcttcatgatggccctgtgcctgtcctctatctacgaggacctgaagatgtatcaggtggagttcaagaccatgaacgccaagctgctgatggaccctaagaggcagatctttctggatcagaatatgctggccgtgatcgacgagctgatgcaggccctgaacttcaatagcgagacagtgccacagaagagctccctggaggagcccgatttctacaagaccaagatcaagctgtgcatcctgctgcacgcctttaggatccgcgccgtgaccatcgaccgcgtgatgtcctatctgaatgcctcttga

SEQ ID NO: 1608 - DNA, 591 bp, synthetic construct
  misc_feature 1..591: note = Description of Artificial Sequence: Synthetic payload sequence
  source 1..591: mol_type = other DNA
agaaatctgccagtggcaacccctgacccaggaatgttcccttgcctgcaccacagccagaacctgctgcgggccgtgtccaatatgctgcagaaggccagacagacactggagttttacccttgtacctctgaggagatcgaccacgaggatatcacaaaggataagaccagcacagtggaggcctgcctgccactggagctgaccaagaacgagtcctgtctgaacagccgggaaaccagcttcatcaccaacggctcctgcctggcctctcgcaagaccagcttcatgatggccctgtgcctgtctagcatctacgaggacctgaagatgtatcaggtggagttcaagaccatgaacgccaagctgctgatggaccctaagaggcagatctttctggatcagaatatgctggccgtgatcgacgagctgatgcaggccctgaacttcaatagcgagacagtgccacagaagtcctctctggaggagcccgatttctacaagaccaagatcaagctgtgcatcctgctgcacgcctttaggatccgcgccgtgaccatcgacagagtgatgtcctatctgaacgcctct

SEQ ID NO: 1609 - DNA, 591 bp, synthetic construct
  misc_feature 1..591: note = Description of Artificial Sequence: Synthetic payload sequence
  source 1..591: mol_type = other DNA
agaaatctgccagtggcaacccctgacccaggaatgttcccttgcctgcaccacagccagaacctgctgagggccgtgtccaatatgctgcagaaggcccgccagacactggagttttacccttgtaccagcgaggagatcgaccacgaggatatcacaaaggataagacctccacagtggaggcctgcctgccactggagctgaccaagaacgagagctgtctgaattcccgggagacatctttcatcaccaacggcagctgcctggcctccagaaagacatcttttatgatggccctgtgcctgtctagcatctacgaggacctgaagatgtatcaggtggagttcaagaccatgaacgccaagctgctgatggaccctaagaggcagatctttctggatcagaatatgctggccgtgatcgacgagctgatgcaggccctgaacttcaatagcgagacagtgccacagaagtcctctctggaggagcccgatttctacaagaccaagatcaagctgtgcatcctgctgcacgcctttaggatccgcgccgtgaccatcgaccgcgtgatgtcttatctgaacgcatcc

SEQ ID NO: 1610 - DNA, 594 bp, synthetic construct
  misc_feature 1..594: note = Description of Artificial Sequence: Synthetic payload sequence
  source 1..594: mol_type = other DNA
agaaacctgcctgtcgctacccccgaccccggaatgttcccctgcctgcaccactcccagaacctcctgagggccgtgtccaacatgctgcagaaggctagacagaccctcgaattctacccctgtaccagcgaggagatcgaccatgaggacatcaccaaggataagaccagcaccgtggaggcttgcctgcctctggagctgaccaaaaacgagagctgcctgaacagcagggaaaccagcttcattaccaacggctcctgcctggcctccaggaagacatccttcatgatggccctgtgcctcagcagcatctacgaggacctgaagatgtatcaggtggagtttaagaccatgaatgccaagctgctgatggaccctaagaggcagatcttcctggaccagaatatgctggccgtgattgacgagctgatgcaggccctcaactttaacagcgagaccgtgccccagaaaagcagcctcgaagagcctgacttctacaaaaccaagattaagctgtgtatcctgctgcacgccttcaggatcagggccgtgaccatcgacagggtgatgagctacctgaacgccagctaa

SEQ ID NO: 1611 - DNA, 597 bp, synthetic construct
  misc_feature 1..597: note = Description of Artificial Sequence: Synthetic payload sequence
  source 1..597: mol_type = other DNA
agaaatctgccagtggccacccctgacccaggcatgttcccctgcctgcaccacagccagaacctgctgagggccgtgtccaatatgctgcagaaggcccgccagacactggagttttacccctgtaccagcgaggagatcgaccacgaggatatcacaaaggataagacctccacagtggaggcctgcctgcctctggagctgaccaagaacgagtcttgtctgaatagcagggagacatccttcatcaccaacggctcttgcctggccagccgcaagacatcctttatgatggccctgtgcctgtcctctatctacgaggacctgaagatgtatcaggtggagttcaagaccatgaacgccaagctgctgatggaccctaagaggcagatctttctggatcagaatatgctggccgtgatcgacgagctgatgcaggccctgaacttcaattccgagacagtgcctcagaagagctccctggaggagccagatttctacaagaccaagatcaagctgtgcatcctgctgcacgcctttcggatcagagccgtgaccatcgaccgcgtgatgtcttatctgaatgccagcggatcc

SEQ ID NO: 1612 - DNA, 597 bp, synthetic construct
  misc_feature 1..597: note = Description of Artificial Sequence: Synthetic payload sequence
  source 1..597: mol_type = other DNA
cggaatctgcctgtggcaacccccgaccctggaatgttcccatgcctgcaccacagccagaacctgctgcgcgccgtgtccaatatgctgcagaaggcccggcagaccctggagttttacccatgtacaagcgaggagatcgaccacgaggatatcaccaaggataagacatccaccgtggaggcatgcctgccactggagctgacaaagaacgagtcttgtctgaacagccgggagacaagcttcatcacaaacggctcttgcctggccagccggaagacctcctttatgatggccctgtgcctgagctccatctacgaggacctgaagatgtatcaggtggagttcaagacaatgaacgccaagctgctgatggaccccaagcgccagatctttctggatcagaatatgctggccgtgatcgacgagctgatgcaggccctgaactttaatagcgagacagtgccccagaagtctagcctggaggagcctgatttctacaagacaaagatcaagctgtgcatcctgctgcacgccttccggatcagagccgtgaccatcgacagagtgatgtcttatctgaatgccagcggatcc

SEQ ID NO: 1613 - DNA, 591 bp, synthetic construct
  misc_feature 1..591: note = Description of Artificial Sequence: Synthetic payload sequence
  source 1..591: mol_type = other DNA
cgcaatctgccagtggcaacccctgacccaggaatgttcccttgcctgcaccacagccagaacctgctgcgggccgtgtccaatatgctgcagaaggcccgccagacactggagttttacccttgtacctctgaggagatcgaccacgaggatatcacaaaggataagaccagcacagtggaggcctgcctgccactggagctgaccaagaacgagagctgtctgaattccagggagacatctttcatcaccaacggcagctgcctggcctccagaaagacatcttttatgatggccctgtgcctgtctagcatctacgaggacctgaagatgtatcaggtggagttcaagaccatgaacgccaagctgctgatggaccctaagaggcagatctttctggatcagaatatgctggccgtgatcgacgagctgatgcaggccctgaacttcaattccgagacagtgccacagaagtcctctctggaggagcccgatttctacaagaccaagatcaagctgtgcatcctgctgcacgccttcaggatcagggccgtgaccatcgacagagtgatgagctatctgaacgccagc

SEQ ID NO: 1614 - DNA, 591 bp, synthetic construct
  misc_feature 1..591: note = Description of Artificial Sequence: Synthetic payload sequence
  source 1..591: mol_type = other DNA
agaaacctgcctgtcgctacccccgaccccggaatgttcccctgcctgcaccactcccagaacctcctgagggccgtgtccaacatgctgcagaaggctagacagaccctcgaattctacccctgtaccagcgaggagatcgaccatgaggacatcaccaaggataagaccagcaccgtggaggcttgcctgcctctggagctgaccaaaaacgagagctgcctgaacagcagggaaaccagcttcattaccaacggctcctgcctggcctccaggaagacatccttcatgatggccctgtgcctcagcagcatctacgaggacctgaagatgtatcaggtggagtttaagaccatgaatgccaagctgctgatggaccctaagaggcagatcttcctggaccagaatatgctggccgtgattgacgagctgatgcaggccctcaactttaacagcgagaccgtgccccagaaaagcagcctcgaagagcctgacttctacaaaaccaagattaagctgtgtatcctgctgcacgccttcaggatcagggccgtgaccatcgacagggtgatgagctacctgaacgccagt

SEQ ID NO: 1615 - protein, 114 aa, Homo sapiens; identical to SEQ ID NO: 718

SEQ ID NO: 1616 - DNA, 345 bp, Homo sapiens; identical to SEQ ID NO: 168
  source 1..345: mol_type = other DNA

SEQ ID NO: 1617 - DNA, 345 bp, synthetic construct
  misc_feature 1..345: note = Description of Artificial Sequence: Synthetic payload sequence
  source 1..345: mol_type = other DNA
aactgggtgaacgtgatctccgacctgaagaagatcgaggacctgatccagtccatgcacatcgacgccaccctgtacaccgagagcgacgtgcaccctagctgcaaggtgaccgccatgaagtgcttcctgctggagctgcaggtgatcagcctggagagcggcgatgccagcatccacgacacagtggagaacctgatcatcctggccaacaacagcctgagcagcaacggcaatgtgaccgagagcggctgcaaggagtgcgaggagctggaggagaagaacatcaaggagttcctgcagtccttcgtgcacatcgtgcagatgttcatcaacaccagctaa

SEQ ID NO: 1618 - DNA, 345 bp, synthetic construct
  misc_feature 1..345: note = Description of Artificial Sequence: Synthetic payload sequence
  source 1..345: mol_type = other DNA
aactgggtcaacgtgatcagcgacctgaagaagatcgaggacctcatccagtccatgcacattgacgccaccctgtacaccgagtccgatgtgcaccctagctgcaaggtgaccgccatgaaatgcttcctgctggagctgcaggtcatctccttagaaagcggcgatgcctccatccacgacaccgtggagaacctgatcatcctggccaataactccctgagcagcaacggcaacgtgaccgagagcggctgcaaagagtgtgaagagctggaggagaagaacattaaggagttcctgcagagcttcgtgcacatcgtgcaaatgttcatcaacaccagctaa

SEQ ID NO: 1619 - DNA, 342 bp, synthetic construct
  misc_feature 1..342: note = Description of Artificial Sequence: Synthetic payload sequence
  source 1..342: mol_type = other DNA
aactgggtgaacgtgatctccgacctgaaaaagatcgaggatttgatccagagcatgcacattgacgccaccctgtataccgagtccgacgtgcacccgagttgcaaggtgactgccatgaagtgcttcctgctggagctgcaagtgatcagcctggagagcggcgacgccagcatccacgacaccgtggaaaaccttatcattctggccaacaatagcctgagcagcaacggcaacgtgaccgaaagcggatgtaaggaatgcgaggaactggaagagaagaatatcaaagaattcctgcaaagcttcgtgcacatcgtgcagatgttcatcaacacttct

SEQ ID NO: 1620 - DNA, 342 bp, synthetic construct
  misc_feature 1..342: note = Description of Artificial Sequence: Synthetic payload sequence
  source 1..342: mol_type = other DNA
aattgggtcaacgtgatcagcgacctgaagaagatcgaggacctgatccagagcatgcacatcgacgccacactgtacaccgagtccgatgtgcaccctagctgcaaagtgaccgccatgaagtgctttctgctggaactgcaagtgatcagcctggaaagcggcgacgccagcatccacgataccgtggaaaatctgatcatcctggccaacaacagcctgagcagcaacggcaatgtgaccgagagcggctgcaaagagtgcgaggaactggaagagaagaacatcaaagagttcctccagagcttcgtccacatcgtgcagatgttcatcaacaccagc

SEQ ID NO: 1621 - protein, 237 aa, Homo sapiens; identical to SEQ ID NO: 724

SEQ ID NO: 1622 - DNA, 714 bp, Homo sapiens
  source 1..714: mol_type = other DNA
atcacgtgccctccccccatgtccgtggaacacgcagacatctgggtcaagagctacagcttgtactccagggagcggtacatttgtaactctggtttcaagcgtaaagccggcacgtccagcctgacggagtgcgtgttgaacaaggccacgaatgtcgcccactggacaacccccagtctcaaatgcattagagaccctgccctggttcaccaaaggccagcgccaccctccacagtaacgacggcaggggtgaccccacagccagagagcctctccccttctggaaaagagcccgcagcttcatctcccagctcaaacaacacagcggccacaacagcagctattgtcccgggctcccagctgatgccttcaaaatcaccttccacaggaaccacagagataagcagtcatgagtcctcccacggcaccccctctcagacaacagccaagaactgggaactcacagcatccgcctcccaccagccgccaggtgtgtatccacagggccacagcgacaccactgtggctatctccacgtccactgtcctgctgtgtgggctgagcgctgtgtctctcctggcatgctacctcaagtcaaggcaaactcccccgctggccagcgttgaaatggaagccatggaggctctgccggtgacttgggggaccagcagcagagatgaagacttggaaaactgctctcaccacctatga

SEQ ID NO: 1623 - DNA, 711 bp, synthetic construct
  misc_feature 1..711: note = Description of Artificial Sequence: Synthetic construct
  source 1..711: mol_type = other DNA
attacctgcccccctccgatgagcgtggagcacgccgacatctgggtcaagagctacagcttgtatagtagggagcggtacatctgtaacagcgggttcaagaggaaggccgggaccagctcactgaccgagtgcgtgttgaacaaggccaccaacgtggcccactggaccacccctagccttaagtgcatcagggacccagcgctcgtacaccagagacccgcgcctccctctacggtaaccacggcaggcgtaaccccccagcccgagagcctgtccccgagcggcaaggagcctgcagcgagcagcccctcaagcaacaacacagccgctaccaccgcggcaatcgtgcccggcagccagctgatgccctcaaagagccccagcaccggcaccactgagataagcagccacgagagctcacacggcactccctcacagaccactgccaagaattgggagctgaccgcctctgccagccaccagcccccaggcgtgtatccccagggccacagcgacaccacggtcgccatcagcacatctacagtgcttttgtgcggccttagcgccgtgtcactgctggcatgctacttgaaaagtaggcaaactccccctcttgccagtgtggaaatggaggccatggaagccctgcccgtgacctggggcaccagttctagggacgaggaccttgagaactgctcacatcatttg

SEQ ID NO: 1624 - DNA, 711 bp, synthetic construct
  misc_feature 1..711: note = Description of Artificial Sequence: Synthetic payload sequence
  source 1..711: mol_type = other DNA
atcacctgtcctccacctatgagcgtggaacacgccgacatctgggtcaagagctacagcctgtacagcagagagcggtacatctgcaacagcggcttcaagagaaaggccggcacaagcagcctgaccgagtgtgtgctgaacaaggccacaaacgtggcccactggaccacacctagcctgaagtgcatcagagatcccgctctggttcaccagaggcctgctcctccatctacagtgacaacagctggcgtgacccctcagcctgagtctctgtctccatctggaaaagagcctgccgccagctctcccagctctaacaatactgctgccaccacagccgccatcgtgcctggatctcagctgatgcctagcaagagccctagcaccggcacaacagagatcagctctcacgagtctagccacggcaccccatctcagaccacagccaagaattgggagctgaccgcctctgcctctcatcagccacctggtgtttaccctcaaggccactctgataccaccgtggccatcagcacaagcacagtgctgctgtgtggactgtctgccgtgtctctgctggcctgctacctgaagtctagacagacacctcctctggccagcgtggaaatggaagccatggaagctctgcctgtgacatggggcaccagcagcagagatgaggacctcgagaattgcagccaccacctg

SEQ ID NO: 1625 - protein, 235 aa, synthetic construct
  REGION 1..235: note = Description of Artificial Sequence: Synthetic polypeptide
LSKGEEDNMAIIKEFMRFKVHMEGSVNGHEFEIEGEGEGRPYEGTQTAKLKVTKGGPLPFAWDILSPQFMYGSKAYVKHPADIPDYLKLSFPEGFKWERVMNFEDGGVVTVTQDSSLQDGEFIYKVKLRGTNFPSDGPVMQKKTMGWEASSERMYPEDGALKGEIKQRLKLKDGGHYDAEVKTTYKAKKPVQLPGAYNVNIKLDITSHNEDYTIVEQYERAEGRHSTGGMDELYK

SEQ ID NO: 1626 - DNA, 705 bp, synthetic construct
  misc_feature 1..705: note = Description of Artificial Sequence: Synthetic polynucleotide
  source 1..705: mol_type = other DNA
ttgagcaagggcgaggaggacaacatggccatcatcaaggagttcatgcgcttcaaggtgcacatggagggctccgtgaacggccacgagttcgagatcgagggcgagggcgagggccgcccctacgagggcacccagaccgccaagctgaaggtgaccaagggcggccccctgcccttcgcctgggacatcctgtcccctcagttcatgtacggctccaaggcctacgtgaagcaccccgccgacatccccgactacttgaagctgtccttccccgagggcttcaagtgggagcgcgtgatgaacttcgaggacggcggcgtggtgaccgtgacccaggactcctccctgcaggacggcgagttcatctacaaggtgaagctgcgcggcaccaacttcccctccgacggccccgtaatgcagaagaagaccatgggctgggaggcctcctccgagcggatgtaccccgaggacggcgccctgaagggcgagatcaagcagaggctgaagctgaaggacggcggccactacgacgccgaggtcaagaccacctacaaggccaagaagcccgtgcagctgcccggcgcctacaacgtcaacatcaagctggacatcacctcccacaacgaggactacaccatcgtggaacagtacgagcgcgccgagggccgccactccaccggcggcatggacgagctgtacaag

SEQ ID NO: 1627 - DNA, 576 bp, synthetic construct
  misc_feature 1..576: note = Description of Artificial Sequence: Synthetic construct
  source 1..576: mol_type = other DNA
cgcccctctccctcccccccccctaacgttactggccgaagccgcttggaataaggccggtgtgcgtttgtctatatgttattttccaccatattgccgtcttttggcaatgtgagggcccggaaacctggccctgtcttcttgacgagcattcctaggggtctttcccctctcgccaaaggaatgcaaggtctgttgaatgtcgtgaaggaagcagttcctctggaagcttcttgaagacaaacaacgtctgtagcgaccctttgcaggcagcggaaccccccacctggcgacaggtgcctctgcggccaaaagccacgtgtataagatacacctgcaaaggcggcacaaccccagtgccacgttgtgagttggatagttgtggaaagagtcaaatggctctcctcaagcgtattcaacaaggggctgaaggatgcccagaaggtaccccattgtatgggatctgatctggggcctcggtgcacatgctttacatgtgtttagtcgaggttaaaaaaacgtctaggccccccgaaccacggggacgtggttttcctttgaaaaacacgatgataa

SEQ ID NO: 1628 - protein, 5 aa, synthetic construct
  REGION 1..5: note = Description of Artificial Sequence: Synthetic linker
GGSGG

SEQ ID NO: 1629 - DNA, 15 bp, synthetic construct
  misc_feature 1..15: note = Description of Artificial Sequence: Synthetic linker
  source 1..15: mol_type = other DNA
ggaggcagcggagga

SEQ ID NO: 1630 - DNA, 15 bp, synthetic construct
  misc_feature 1..15: note = Description of Artificial Sequence: Synthetic linker
  source 1..15: mol_type = other DNA
ggaggctctggagga

SEQ ID NO: 1631 - DNA, 15 bp, synthetic construct
  misc_feature 1..15: note = Description of Artificial Sequence: Synthetic linker
  source 1..15: mol_type = other DNA
ggaggctccggcgga

SEQ ID NO: 1632 - DNA, 15 bp, synthetic construct
  misc_feature 1..15: note = Description of Artificial Sequence: Synthetic linker
  source 1..15: mol_type = other DNA
ggaggctccggcgga

SEQ ID NO: 1633 - DNA, 15 bp, synthetic construct
  misc_feature 1..15: note = Description of Artificial Sequence: Synthetic linker
  source 1..15: mol_type = other DNA
ggaggatctggagga

SEQ ID NO: 1634 - skipped

SEQ ID NO: 1635 - protein, 15 aa, synthetic construct
  REGION 1..15: note = Description of Artificial Sequence: Synthetic linker
GGGGSGGGGSGGGGS

SEQ ID NO: 1636 - DNA, 45 bp, synthetic construct
  misc_feature 1..45: note = Description of Artificial Sequence: Synthetic linker
  source 1..45: mol_type = other DNA
ggaggaggaggatccggaggaggaggatctggcggcggcggcagc

SEQ ID NO: 1637 - DNA, 45 bp, synthetic construct
  misc_feature 1..45: note = Description of Artificial Sequence: Synthetic linker
  source 1..45: mol_type = other DNA
ggaggaggaggatccggaggaggaggatctggcggaggaggcagc

SEQ ID NO: 1638 - DNA, 45 bp, synthetic construct
  misc_feature 1..45: note = Description of Artificial Sequence: Synthetic linker
  source 1..45: mol_type = other DNA
ggaggaggaggaagcggaggaggaggatccggcggaggaggctct

SEQ ID NO: 1639 - DNA, 45 bp, synthetic construct
  misc_feature 1..45: note = Description of Artificial Sequence: Synthetic linker
  source 1..45: mol_type = other DNA
ggaggaggaggcagcggaggaggaggttctggaggaggcggcagc

SEQ ID NO: 1640 - DNA, 45 bp, synthetic construct
  misc_feature 1..45: note = Description of Artificial Sequence: Synthetic linker
  source 1..45: mol_type = other DNA
ggcggcggcggctctggaggaggaggcagcggcggaggaggctcc

SEQ ID NO: 1641 - DNA, 45 bp, synthetic construct
  misc_feature 1..45: note = Description of Artificial Sequence: Synthetic linker
  source 1..45: mol_type = other DNA
ggaggaggaggcagcggcggaggaggctccggcggcggcggctct

SEQ ID NO: 1642 - protein, 4 aa, synthetic construct
  REGION 1..4: note = Description of Artificial Sequence: Synthetic linker
GGSG

SEQ ID NO: 1643 - DNA, 12 bp, synthetic construct
  misc_feature 1..12: note = Description of Artificial Sequence: Synthetic linker
  source 1..12: mol_type = other DNA
ggaggatctgga

SEQ ID NO: 1644 - protein, 22 aa, synthetic construct
  REGION 1..22: note = Description of Artificial Sequence: Synthetic linker
MLLLVTSLLLCELPHPAFLLIP

SEQ ID NO: 1645 - DNA, 66 bp, synthetic construct
  misc_feature 1..66: note = Description of Artificial Sequence: Synthetic linker
  source 1..66: mol_type = other DNA
atgcttctcctggtgacaagccttctgctctgtgagttaccacacccagcattcctcctgatccca

SEQ ID NO: 1646 - protein, 26 aa, synthetic construct
  REGION 1..26: note = Description of Artificial Sequence: Synthetic linker
SGGGSGGGGSGGGGSGGGGSGGGSLQ

SEQ ID NO: 1647 - DNA, 78 bp, synthetic construct
  misc_feature 1..78: note = Description of Artificial Sequence: Synthetic linker
  source 1..78: mol_type = other DNA
tcaggtggcggtagtggtgggggaggatctggaggcggaggaagcgggggtggaggttcaggaggagggagcttgcaa

SEQ ID NO: 1648 - DNA, 78 bp, synthetic construct
  misc_feature 1..78: note = Description of Artificial Sequence: Synthetic linker
  source 1..78: mol_type = other DNA
tcaggtggcggtagtggtgggggaggatctggaggcggaggaagcgggggtggaggttcaggtggaggcagcttgcaa

SEQ ID NO: 1649 - DNA, 78 bp, synthetic construct
  misc_feature 1..78: note = Description of Artificial Sequence: Synthetic linker
  source 1..78: mol_type = other DNA
tccggtggaggtagcggtggagggggttctggtggaggaggttctggaggtggaggttctggcggtgggtccttgcaa

SEQ ID NO: 1650 - DNA, 78 bp, synthetic construct
  misc_feature 1..78: note = Description of Artificial Sequence: Synthetic linker
  source 1..78: mol_type = other DNA
tctggcggaggaagcggaggcggaggatctggtggtggtggatctggcggcggtggtagtggcggaggttctctgcaa

SEQ ID NO: 1651 - DNA, 78 bp, synthetic construct
  misc_feature 1..78: note = Description of Artificial Sequence: Synthetic linker
  source 1..78: mol_type = other DNA
tccggggggggtagcgggggagggggttccggcgggggagggtctggagggggaggttccggcggggggtccttgcaa

SEQ ID NO: 1652 - DNA, 78 bp, synthetic construct
  misc_feature 1..78: note = Description of Artificial Sequence: Synthetic linker
  source 1..78: mol_type = other DNA
tctggcggaggatctggaggaggcggatctggaggaggaggcagtggaggcggaggatctggcggaggatctctgcag

SEQ ID NO: 1653 - DNA, 78 bp, synthetic construct; identical to SEQ ID NO: 1650
  misc_feature 1..78: note = Description of Artificial Sequence: Synthetic linker
  source 1..78: mol_type = other DNA

SEQ ID NO: 1654 - protein, 12 aa, synthetic construct
  REGION 1..12: note = Description of Artificial Sequence: Synthetic cleavage site
ESRRVRRNKRSK

SEQ ID NO: 1655 - DNA, 36 bp, synthetic construct; identical to SEQ ID NO: 1337
  misc_feature 1..36: note = Description of Artificial Sequence: Synthetic cleavage site
  source 1..36: mol_type = other DNA

SEQ ID NO: 1656 - DNA, 36 bp, synthetic construct; identical to SEQ ID NO: 1338
  misc_feature 1..36: note = Description of Artificial Sequence: Synthetic cleavage site
  source 1..36: mol_type = other DNA

SEQ ID NO: 1657 - DNA, 36 bp, synthetic construct; identical to SEQ ID NO: 1339
  misc_feature 1..36: note = Description of Artificial Sequence: Synthetic cleavage site
  source 1..36: mol_type = other DNA

SEQ ID NO: 1658 - skipped

SEQ ID NO: 1659 - DNA, 32 bp, synthetic construct
  misc_feature 1..32: note = Description of Artificial Sequence: Synthetic oligonucleotide
  source 1..32: mol_type = other DNA
gcttgccacaacccacaaggagacgaccttcc

SEQ ID NO: 1660 - protein, 9 aa, synthetic construct
  REGION 1..9: note = Description of Artificial Sequence: Synthetic HA Tag
YPYDVPDYA

SEQ ID NO: 1661 - DNA, 27 bp, synthetic construct
  misc_feature 1..27: note = Description of Artificial Sequence: Synthetic HA Tag
  source 1..27: mol_type = other DNA
tacccatacgatgttccagattacgct

SEQ ID NO: 1662 - DNA, 27 bp, synthetic construct
  misc_feature 1..27: note = Description of Artificial Sequence: Synthetic HA Tag
  source 1..27: mol_type = other DNA
tatccttacgatgtgcccgactatgct

SEQ ID NO: 1663 - DNA, 27 bp, synthetic construct
  misc_feature 1..27: note = Description of Artificial Sequence: Synthetic HA Tag
  source 1..27: mol_type = other DNA
tatccgtacgacgtaccagactacgca

SEQ ID NO: 1664 - DNA, 321 bp, synthetic construct
  misc_feature 1..321: note = Description of Artificial Sequence: Synthetic destabilizing domain (DD)
  source 1..321: mol_type = other DNA
ggagtgcaggtggagacaatctctcctggcgatggccggaccttcccaaagagaggccagacatgcgtggtgcactacaccggcatgctggaggacggcaagaaggtggacagctcccgggatagaaacaagccattcaagtttatgctgggcaagcaggaagtgatcaggggatgggaggagggagtggcacagatgtctgtgggccagagagccaagctgacaatcagccctgattacgcatatggagcaaccggacacccaggaatcatcccacctcacgccaccctggtgtttgatgtggagctgctgaagccagag

SEQ ID NO: 1665 - DNA, 321 bp, synthetic construct
  misc_feature 1..321: note = Description of Artificial Sequence: Synthetic destabilizing domain (DD)
  source 1..321: mol_type = other DNA
ggcgtgcaggtggagacaatctcccctggcgatggccggaccttcccaaagagaggccagacatgcgtggtgcactacaccggcatgctggaggacggcaagaaggtggacagctcccgggatagaaacaagcctttcaagtttatgctgggcaagcaggaagtgatcaggggatgggaggagggagtggcacagatgtctgtgggccagagagccaagctgacaatcagccctgattacgcatatggagcaaccggacacccaggaatcatcccacctcacgccaccctggtgtttgacgtggagctgctgaagccagag

SEQ ID NO: 1666 - DNA, 321 bp, synthetic construct
  misc_feature 1..321: note = Description of Artificial Sequence: Synthetic destabilizing domain (DD)
  source 1..321: mol_type = other DNA
ggagtgcaggtggagacaatctcccctggcgatggcaggaccttcccaaagcgcggccagacatgcgtggtgcactacaccggcatgctggaggacggcaagaaggtggacagctcccgggatagaaacaagccattcaagtttatgctgggcaagcaggaagtgatcaggggatgggaggagggagtggcacagatgtccgtgggacagcgcgccaagctgacaatctctcctgattacgcatatggagcaaccggacacccaggaatcatcccacctcacgccaccctggtgtttgacgtggagctgctgaagcccgag

SEQ ID NO: 1667 - DNA, 321 bp, synthetic construct
  misc_feature 1..321: note = Description of Artificial Sequence: Synthetic destabilizing domain (DD)
  source 1..321: mol_type = other DNA
ggcgtgcaggtggagacaatcagcccaggcgacggacgcacctttccaaagaggggacagacatgcgtggtgcactacaccggcatgctggaggatggcaagaaggtggactcctctagagatcggaataagccattcaagtttatgctgggcaagcaggaagtgatcagaggctgggaggagggagtggcacagatgtctgtgggacagcgggccaagctgacaatcagccctgactatgcatacggagcaaccggacacccaggaatcatcccaccacacgccacactggtgttcgatgtggagctgctgaagcctgag

SEQ ID NO: 1668 - DNA, 321 bp, synthetic construct
  misc_feature 1..321: note = Description of Artificial Sequence: Synthetic destabilizing domain (DD)
  source 1..321: mol_type = other DNA
ggagtgcaggtggagacaatctccccaggcgacggcagaacctttcccaagcggggccagacatgcgtggtgcactataccggcatgctggaggatggcaagaaggtggactcctctagagatcggaacaagccattcaagtttatgctgggcaagcaggaagtgatcagaggctgggaggagggagtggcacagatgtctgtgggacagcgggccaagctgacaatcagcccagactatgcatacggagcaaccggacaccctggaatcatccctccacacgccaccctggtgttcgatgtggagctgctgaagcctgag

SEQ ID NO: 1669 - DNA, 324 bp, synthetic construct
  misc_feature 1..324: note = Description of Artificial Sequence: Synthetic destabilizing domain (DD)
  source 1..324: mol_type = other DNA
ggcgtgcaggtggagacaatcagccccggcgatggccggacctttcctaagagaggccagacatgcgtggtgcactacaccggcatgctgggcgacggcaagaaggtggacagctccagggatcgcaataagcccttcaagtttatgctgggcaagcaggaagtgatcaggggatgggaggagggagtggcacagatgtccgtgggacagggcgccaagctgacaatctctccagattacgcatatggagcaaccggacacccaggaatcatcccaccccacgccaccctggtgttcgacgtggagctgctggagctggagtga

SEQ ID NO: 1670 - DNA, 324 bp, synthetic construct
  misc_feature 1..324: note = Description of Artificial Sequence: Synthetic destabilizing domain (DD)
  source 1..324: mol_type = other DNA
ggagtgcaggtggagacaatcagccccggcgatggcaggacctttcctaagcgcggccagacatgcgtggtgcactacaccggcatgctgggcgacggcaagaaggtggacagctcccgggatagaaataagcccttcaagtttatgctgggcaagcaggaagtgatcagaggctgggaggagggagtggcacagatgtctgtgggacagggcgccaagctgacaatcagcccagattacgcatatggagcaaccggacacccaggaatcatcccaccccacgccaccctggtgttcgacgtggagctgctggagctggagtga

SEQ ID NO: 1671 - DNA, 324 bp, synthetic construct
  misc_feature 1..324: note = Description of Artificial Sequence: Synthetic destabilizing domain (DD)
  source 1..324: mol_type = other DNA
ggcgtgcaggtggagacaatcagccccggcgatggccggacctttcctaagcgcggccagacatgcgtggtgcactacaccggcatgctgggcgacggcaagaaggtggacagctccagggatagaaacaagccattcaagtttatgctgggcaagcaggaagtgatcagaggatgggaggagggagtggcacagatgtccgtgggacagggcgccaagctgacaatctctccagattacgcatatggagcaaccggacacccaggaatcatcccaccccacgccaccctggtgttcgacgtggagctgctggagctggagtga

SEQ ID NO: 1672 - DNA, 324 bp, synthetic construct
  misc_feature 1..324: note = Description of Artificial Sequence: Synthetic destabilizing domain (DD)
  source 1..324: mol_type = other DNA
ggagtgcaggtggagacaatcagcccaggcgacggaaggacattcccaaagaggggacagacctgcgtggtgcactacacaggcatgctgggcgatggcaagaaggtggacagctcccgggatagaaacaagcccttcaagtttatgctgggcaagcaggaagtgatcaggggatgggaggagggagtggcacagatgtccgtgggacagggcgccaagctgaccatctctcctgactacgcctatggagcaacaggacacccaggaatcatcccacctcacgccaccctggtgtttgatgtggagctgctggagctggagtga

SEQ ID NO: 1673 - DNA, 321 bp, synthetic construct
  misc_feature 1..321: note = Description of Artificial Sequence: Synthetic destabilizing domain (DD)
  source 1..321: mol_type = other DNA
ggagtgcaggtggagacaatcagcccaggcgacggaaggacattcccaaagaggggacagacctgcgtggtgcactacacaggcatgctgggcgatggcaagaaggtggacagctcccgggatagaaacaagcccttcaagtttatgctgggcaagcaggaagtgatcaggggatgggaggagggagtggcacagatgtccgtgggacagggcgccaagctgaccatctctcctgactacgcctatggagcaacaggacacccaggaatcatcccacctcacgccaccctggtgtttgatgtggagctgctggagctggag

SEQ ID NO: 1674 - DNA, 321 bp, synthetic construct
  misc_feature 1..321: note = Description of Artificial Sequence: Synthetic destabilizing domain (DD)
  source 1..321: mol_type = other DNA
ggagtgcaggtggagacaatcagccccggcgatggcaggacctttcctaagcgcggccagacatgcgtggtgcactacaccggcatgctgggcgacggcaagaaggtggacagctcccgggatagaaataagcccttcaagtttatgctgggcaagcaggaagtgatcagaggctgggaggagggagtggcacagatgtctgtgggacagggcgccaagctgacaatcagcccagattacgcatatggagcaaccggacacccaggaatcatcccaccccacgccaccctggtgttcgacgtggagctgctggagctggag

SEQ ID NO: 1675 - DNA, 321 bp, synthetic construct
  misc_feature 1..321: note = Description of Artificial Sequence: Synthetic destabilizing domain (DD)
  source 1..321: mol_type = other DNA
ggagtgcaggtggaaaccatctccccaggagacgggcgcaccttccccaagcgcggccagacctgcgtggtgcactacaccgggatgcttggagatggaaagaaagttgactcctcccgggacagaaacaagccctttaagtttatgctaggcaagcaggaggtgatccgaggctgggaagaaggggttgcccagatgagtgtgggtcagggagccaaactgactatatctccagattatgcctatggtgccactgggcacccaggcatcatcccaccacatgccactctcgtcttcgatgtggagcttctagaactggaa

SEQ ID NO: 1676 - DNA, 474 bp, synthetic construct
  misc_feature 1..474: note = Description of Artificial Sequence: Synthetic destabilizing domain (DD)
  source 1..474: mol_type = other DNA
atctccctgatcgccgccctggccgtggattatgtgatcggcatggagaacgccatgccctggaatctgcccgccgacctggcctggttcaagaggaataccctgaacaagcccgtcatcatgggcaggcacacctgggaaagcatcggcagacccctgcccggcaggaagaacatcatcctgtccagccagcccggcaccgacgacagagtgacctgggtgaagagcgtggacgaagctatcgccgcttgcggcgacgtgcccgagatcatggtgatcggcggcggcagggtgatcgaacagttcctgcccaaggcccagaagctgtacctgacccacatcgatgccgaggtggaaggcgatacacacttccccgattacgaacctgacgactgggaaagcgtgttttccgaattccacgacgccgacgcccagaacagccacagctactgcttcgagatcctggaaagaagg

SEQ ID NO: 1677 - DNA, 477 bp, synthetic construct
  misc_feature 1..477: note = Description of Artificial Sequence: Synthetic destabilizing domain (DD)
  source 1..477: mol_type = other DNA
atctctctgattgcggcgctggcagttgactacgttattggcatggaaaacgcgatgccatggaacctcccggctgacctggcgtggttcaaacgtaacaccctgaacaaacctgtgatcatgggtcgtcacacctgggaatctattggccgtcctctcccgggtcgtaaaaacatcattctgtcttctcagccaggcaccgacgaccgtgttacctgggttaaaagcgttgacgaagcgattgctgcgtgcggtgatgttcctgaaattatggtgatcggcggtggccgtgttatcgaacagttcctgccgaaagcgcagaaactgtacctgacccacatcgacgcggaagttgaaggtgacacccacttcccggactacgaaccggatgattgggagagcgtattctccgaattccatgatgcggatgcgcaaaactctcattcttactgttttgaaatcctggaacgtcgttga

SEQ ID NO: 1678 - DNA, 474 bp, synthetic construct
  misc_feature 1..474: note = Description of Artificial Sequence: Synthetic destabilizing domain (DD)
  source 1..474: mol_type = other DNA
atctctctgattgcggcgctggcagttgactacgttattggcatggaaaacgcgatgccatggaacctcccggctgacctggcgtggttcaaacgtaacaccctgaacaaacctgtgatcatgggtcgtcacacctgggaatctattggccgtcctctcccgggtcgtaaaaacatcattctgtcttctcagccaggcaccgacgaccgtgttacctgggttaaaagcgttgacgaagcgattgctgcgtgcggtgatgttcctgaaattatggtgatcggcggtggccgtgttatcgaacagttcctgccgaaagcgcagaaactgtacctgacccacatcgacgcggaagttgaaggtgacacccacttcccggactacgaaccggatgattgggagagcgtattctccgaattccatgatgcggatgcgcaaaactctcattcttactgttttgaaatcctggaacgtcgt

SEQ ID NO: 1679 - DNA, 474 bp, synthetic construct
  misc_feature 1..474: note = Description of Artificial Sequence: Synthetic destabilizing domain (DD)
  source 1..474: mol_type = other DNA
atctctctgatcgccgccctggccgtggattacgtgatcggcatggagaacgccatgccatggaatctgccagcagacctggcatggttcaagaggaacacactgaataagccagtgatcatgggcagacacacctgggagtccatcggccggccactgccaggcagaaagaacatcatcctgagctcccagcccggcacagacgatagggtgacctgggtgaagagcgtggacgaggcaatcgcagcatgcggcgatgtgcctgagatcatggtcatcggaggaggacgcgtgatcgagcagttcctgccaaaggcccagaagctgtacctgacacacatcgatgccgaggtggagggcgacacccactttcctgattatgagccagacgattgggagtccgtgttctctgagtttcacgacgccgatgcccagaactctcacagctattgttttgagatcctggagcggaga

SEQ ID NO: 1680 - DNA, 474 bp, synthetic construct
  misc_feature 1..474: note = Description of Artificial Sequence: Synthetic destabilizing domain (DD)
  source 1..474: mol_type = other DNA
atctccctgatcgccgccctggcagtggactacgtgatcggcatggagaacgccatgccctggaatctgcctgccgatctggcctggtttaagagaaacacactgaataagcccgtgatcatgggccggcacacctgggagtctatcggcaggcccctgcctggcaggaagaacatcatcctgtcctctcagcctggcacagacgatagagtgacctgggtgaagagcgtggacgaggcaatcgcagcatgtggcgatgtgcccgagatcatggtcatcggcggcggcagagtgatcgagcagttcctgcctaaggcccagaagctgtatctgacacacatcgacgccgaggtggagggcgacacccactttccagattacgagcccgacgattgggagtccgtgttctctgagtttcacgacgccgatgcccagaattcccactcttattgcttcgagatcctggagaggaga

SEQ ID NO: 1681 - DNA, 474 bp, synthetic construct
  misc_feature 1..474: note = Description of Artificial Sequence: Synthetic destabilizing domain (DD)
  source 1..474: mol_type = other DNA
atctccctgatcgccgccctggcagtggactacgtgatcggcatggagaacgccatgccctggaatctgcctgccgatctggcctggtttaagagaaacacactgaataagcccgtgatcatgggccggcacacctgggagagcatcggcagacctctgccaggccggaagaacatcatcctgtcctctcagcctggcacagacgatagagtgacctgggtgaagtccgtggacgaggcaatcgcagcatgcggcgatgtgcccgagatcatggtcatcggcggcggcagagtgatcgagcagttcctgcctaaggcccagaagctgtatctgacacacatcgacgccgaggtggagggcgacacccactttccagattacgagcccgacgattgggagtccgtgttctctgagtttcacgacgccgatgcccagaattcccactcttattgtttcgagatcctggagagaaga

SEQ ID NO: 1682 - DNA, 477 bp, synthetic construct
  misc_feature 1..477: note = Description of Artificial Sequence: Synthetic destabilizing domain (DD)
  source 1..477: mol_type = other DNA
atctctctgattgcggcgctggcagttgaccacgttattggcatggaaaacgcgatgccatggaacctcccggctgacctggcgtggttcaaacgtaacaccctgaacaaacctgtgatcatgggtcgtcacacctgggaatctattggccgtcctctcccgggtcgtaaaaacatcattctgtcttctcagccaggcaccgacgaccgtgttacctgggttaaaagcgttgacgaagcgattgctgcgtgcggtgatgttcctgaaattatggtgatcggcggtggccgtgtttacgaacagttcctgccgaaagcgcagaaactgtacctgacccacatcgacgcggaagttgaaggtgacacccacttcccggactacaaaccggatgattgggagagcgtattctccgaattccatgatgcggatgcgcaaaactctcattcttactgttttgaaatcctggaacgtcgttga

SEQ ID NO: 1683 - DNA, 474 bp, synthetic construct
  misc_feature 1..474: note = Description of Artificial Sequence: Synthetic destabilizing domain (DD)
  source 1..474: mol_type = other DNA
atctctctgattgcggcgctggcagttgaccacgttattggcatggaaaacgcgatgccatggaacctcccggctgacctggcgtggttcaaacgtaacaccctgaacaaacctgtgatcatgggtcgtcacacctgggaatctattggccgtcctctcccgggtcgtaaaaacatcattctgtcttctcagccaggcaccgacgaccgtgttacctgggttaaaagcgttgacgaagcgattgctgcgtgcggtgatgttcctgaaattatggtgatcggcggtggccgtgtttacgaacagttcctgccgaaagcgcagaaactgtacctgacccacatcgacgcggaagttgaaggtgacacccacttcccggactacaaaccggatgattgggagagcgtattctccgaattccatgatgcggatgcgcaaaactctcattcttactgttttgaaatcctggaacgtcgt

SEQ ID NO: 1684 - DNA, 474 bp, synthetic construct
  misc_feature 1..474: note = Description of Artificial Sequence: Synthetic destabilizing domain (DD)
  source 1..474: mol_type = other DNA
atctccctgatcgccgccctggcagtggaccacgtgatcggcatggagaacgccatgccatggaatctgcccgccgatctggcctggttcaagcggaacaccctgaataagccagtgatcatgggcagacacacatgggagtctatcggcaggcccctgcctggacgcaagaacatcatcctgagctcccagcccggcaccgacgatagggtgacatgggtgaagtccgtggacgaggcaatcgcagcatgcggcgatgtgcccgagatcatggtcatcggcggcggcagagtgtacgagcagttcctgcctaaggcccagaagctgtatctgacccacatcgacgccgaggtggagggcgacacacactttcctgattacaagccagacgattgggagtccgtgttctctgagtttcacgacgccgatgcccagaattctcacagctattgttttgagatcctggagcggaga

SEQ ID NO: 1685 - DNA, 558 bp, synthetic construct
  misc_feature 1..558: note = Description of Artificial Sequence: Synthetic destabilizing domain (DD)
  source 1..558: mol_type = other DNA
gttggttcgctaaactgcatcgtcgctgtgtcccagaacatgggcatcggcaagaacggggacctgccctggccaccgctcaggaatgaattcagatatttccagagaatgaccacaacctcttcagtagaaggtaaacagaatctggtgattatgggtaagaagacctggttctccattcctgagaagaatcgacctttaaagggtagaattaatttagttctcagcagagaactcaaggaacctccacaaggagctcattttctttccagaagtctagatgatgccttaaaacttactgaacaaccagaattagcaaataaagtagacatggtctggatagttggtggcagttctgttattaaggaagccatgaatcacccaggccatcttaaactatttgtgacaaggatcatgcaagactttgaaagtgacacgttttttccagaaattgatttggagaaatataaacttctgccagaatacccaggtgttctctctgatgtccaggaggagaaaggcattaagtacaaatttgaagtatatgagaagaatgat

SEQ ID NO: 1686 - DNA, 558 bp, synthetic construct
  misc_feature 1..558: note = Description of Artificial Sequence: Synthetic destabilizing domain (DD)
  source 1..558: mol_type = other DNA
gtgggctccctgaactgcatcgtggccgtgagccagaacatgggcatcggcaagaatggcgacctgccttggccacctctgaggaacgagttcagatactttcagaggatgaccacaaccagctccgtggagggcaagcagaacctggtcatcatgggcaagaagacatggttctctatccccgagaagaaccgccctctgaagggccggatcaatctggtgctgagcagagagctgaaggagccaccacagggagcacacttcctgagccggagcctggacgatgccctgaagctgaccgagcagcccgagctggccaacaaggtggacatggtgtggatcgtgggcggctctagcgtgatcaaggaggccatgaatcacccaggccacctgaagctgttcgtgacaagaatcatgcaggactttgagtccgataccttctttcccgagatcgacctggagaagtacaagctgctgcctgagtatccaggcgtgctgtctgatgtgcaggaggagaagggcatcaagtacaagttcgaggtgtatgagaagaatgat

SEQ ID NO: 1687 - DNA, 561 bp, synthetic construct; identical to SEQ ID NO: 77
  misc_feature 1..561: note = Description of Artificial Sequence: Synthetic destabilizing domain (DD)
  source 1..561: mol_type = other DNA

SEQ ID NO: 1688 - DNA, 561 bp, synthetic construct
  misc_feature 1..561: note = Description of Artificial Sequence: Synthetic destabilizing domain (DD)
  source 1..561: mol_type = other DNA
gttggttcgctaaactgcatcgtcgctgtgtcccagaacatgggcatcggcaagaacggggacctgccctggccaccgctcaggaatgaattcagatatttccagagaatgaccacaacctcttcagtagaaggtaaacagaatctggtgattatgggtaagaagacctggttctccattcctgagaagaatcgacctttaaagggtagaattaatttagttctcagcagagaactcaaggaacctccacaaggagctcattttctttccagaagtctagatgatgccttaaaacttactgaacaaccagaattagcaaataaagtagacatggtctggatagttggtggcagttctgttattaaggaattcatgaatcacccaggccatcttaaactatttgtgacaaggatcatgcaagactttgaaagtgacacgttttttccagaaattgatttggagaaatataaacttctgccagaatacccaggtgttctctctgatgtccaggaggagaaaggcattaagtacaaatttgaagtatatgagaagaatgattga

SEQ ID NO: 1689 - DNA, 558 bp, synthetic construct
  misc_feature 1..558: note = Description of Artificial Sequence: Synthetic destabilizing domain (DD)
  source 1..558: mol_type = other DNA
gttggttcgctaaactgcatcgtcgctgtgtcccagaacatgggcatcggcaagaacggggacctgccctggccaccgctcaggaatgaattcagatatttccagagaatgaccacaacctcttcagtagaaggtaaacagaatctggtgattatgggtaagaagacctggttctccattcctgagaagaatcgacctttaaagggtagaattaatttagttctcagcagagaactcaaggaacctccacaaggagctcattttctttccagaagtctagatgatgccttaaaacttactgaacaaccagaattagcaaataaagtagacatggtctggatagttggtggcagttctgttattaaggaattcatgaatcacccaggccatcttaaactatttgtgacaaggatcatgcaagactttgaaagtgacacgttttttccagaaattgatttggagaaatataaacttctgccagaatacccaggtgttctctctgatgtccaggaggagaaaggcattaagtacaaatttgaagtatatgagaagaatgat

SEQ ID NO: 1690 - DNA, 558 bp, synthetic construct
  misc_feature 1..558: note = Description of Artificial Sequence: Synthetic destabilizing domain (DD)
  source 1..558: mol_type = other DNA
gtgggctccctgaactgcatcgtggccgtgagccagaacatgggcatcggcaagaatggcgacctgccttggccacctctgaggaacgagttcagatactttcagaggatgaccacaaccagctccgtggagggcaagcagaacctggtcatcatgggcaagaagacatggttctctatccccgagaagaaccgccctctgaagggccggatcaatctggtgctgagcagagagctgaaggagccaccacagggagcacacttcctgagccggagcctggacgatgccctgaagctgaccgagcagcccgagctggccaacaaggtggacatggtgtggatcgtgggcggctctagcgtgatcaaggagttcatgaatcacccaggccacctgaagctgttcgtgacaagaatcatgcaggactttgagtccgataccttctttcccgagatcgacctggagaagtacaagctgctgcctgagtatccaggcgtgctgtctgatgtgcaggaggagaagggcatcaagtacaagttcgaggtgtatgagaagaatgat

SEQ ID NO: 1691 - DNA, 561 bp, synthetic construct; identical to SEQ ID NO: 83
  misc_feature 1..561: note = Description of Artificial Sequence: Synthetic destabilizing domain (DD)
  source 1..561: mol_type = other DNA

SEQ ID NO: 1692 - DNA, 558 bp, synthetic construct
  misc_feature 1..558: note = Description of Artificial Sequence: Synthetic destabilizing domain (DD)
  source 1..558: mol_type = other DNA
gtgggctccctgaactgcatcgtggccgtgagccagaacatgggcatcggcaagaatggcgacctgccttggccacctctgaggaacgagttcagatactttaagaggatgaccacaaccagctccgtggagggcaagcagaacctggtcatcatgggcaagaagacatggttctctatccccgagaagaaccgccctctgaagggccggatcaatctggtgctgagcagagagctgaaggagccaccacagggagcacacttcctgagccggagcctggacgatgccctgaagctgaccgagcagcccgagctggccaacaaggtggacatggtgtggatcgtgggcggctctagcgtgatcaaggaggccatgaatcacccaggccacctgaagctgttcgtgacaagaatcatgcaggactttgagtccgataccttctttcccgagatcgacctggagaagtacaagctgctgcctgagtatccaggcgtgctgtctgatgtgcaggaggagaagggcatcaagtacaagttcgaggtgtatgagaagaatgat

SEQ ID NO: 1693 - DNA, 561 bp, synthetic construct; identical to SEQ ID NO: 85
  misc_feature 1..561: note = Description of Artificial Sequence: Synthetic destabilizing domain (DD)
  source 1..561: mol_type = other DNA

SEQ ID NO: 1694 - DNA, 561 bp, synthetic construct
  misc_feature 1..561: note = Description of Artificial Sequence: Synthetic destabilizing domain (DD)
  source 1..561: mol_type = other DNA
gttggttcgctaaactgcatcgtcgctgtgtcccagaacatgggcatcggcaagaacggggacctgccctggccaccgctcaggaatgaattcagatatttcttcagaatgaccacaacctcttcagtagaaggtaaacagaatctggtgattatgggtaagaagacctggttctccattcctgagaagttccgacctttaaagggtagaattaatttagttctcagcagagaactcaaggaacctccacaaggagctcattttctttccagaagtctagatgatgccttaaaacttactgaacaaccagaattagcaaataaagtagacatggtctggatagttggtggcagttctgttattaaggaagccatgaatcacccaggccatcttaaactatttgtgacaaggatcatgcaagactttgaaagtgacacgttttttccagaaattgatttggagaaatataaacttctgccagaatacccaggtgttctctctgatgtccaggaggagaaaggcattaagtacaaatttgaagtatatgagaagaatgattga

SEQ ID NO: 1695 - DNA, 558 bp, synthetic construct
  misc_feature 1..558: note = Description of Artificial Sequence: Synthetic destabilizing domain (DD)
  source 1..558: mol_type = other DNA
gttggttcgctaaactgcatcgtcgctgtgtcccagaacatgggcatcggcaagaacggggacctgccctggccaccgctcaggaatgaattcagatatttcttcagaatgaccacaacctcttcagtagaaggtaaacagaatctggtgattatgggtaagaagacctggttctccattcctgagaagttccgacctttaaagggtagaattaatttagttctcagcagagaactcaaggaacctccacaaggagctcattttctttccagaagtctagatgatgccttaaaacttactgaacaaccagaattagcaaataaagtagacatggtctggatagttggtggcagttctgttattaaggaagccatgaatcacccaggccatcttaaactatttgtgacaaggatcatgcaagactttgaaagtgacacgttttttccagaaattgatttggagaaatataaacttctgccagaatacccaggtgttctctctgatgtccaggaggagaaaggcattaagtacaaatttgaagtatatgagaagaatgat

SEQ ID NO: 1696 - DNA, 558 bp, synthetic construct
  misc_feature 1..558: note = Description of Artificial Sequence: Synthetic destabilizing domain (DD)
  source 1..558: mol_type = other DNA
gtgggctccctgaactgcatcgtggccgtgagccagaacatgggcatcggcaagaatggcgacctgccttggccacctctgaggaacgagttcagatactttttcaggatgaccacaaccagctccgtggagggcaagcagaacctggtcatcatgggcaagaagacatggttctctatccccgagaagttccgccctctgaagggccggatcaatctggtgctgagcagagagctgaaggagccaccacagggagcacacttcctgagccggagcctggacgatgccctgaagctgaccgagcagcccgagctggccaacaaggtggacatggtgtggatcgtgggcggctctagcgtgatcaaggaggccatgaatcacccaggccacctgaagctgttcgtgacaagaatcatgcaggactttgagtccgataccttctttcccgagatcgacctggagaagtacaagctgctgcctgagtatccaggcgtgctgtctgatgtgcaggaggagaagggcatcaagtacaagttcgaggtgtatgagaagaatgat

SEQ ID NO: 1697 - DNA, 1461 bp, synthetic construct
  misc_feature 1..1461: note = Description of Artificial Sequence: Synthetic construct
  source 1..1461: mol_type = other DNA
atggcactgcctgtgaccgccctgctgctgccactggccctgctgctgcacgcagccaggcccgacatccagatgacacagaccacaagctccctgtccgcctctctgggcgacagagtgaccatcagctgccgggcctcccaggatatctctaagtatctgaactggtaccagcagaagcccgatggcacagtgaagctgctgatctatcacaccagccgcctgcactccggagtgccttctaggttcagcggctccggctctggcacagactacagcctgaccatctccaacctggagcaggaggatatcgccacctatttctgccagcagggcaatacactgccttacacctttggcggcggcacaaagctggagatcaccggaggaggaggcagcggaggaggaggctccggcggcggcggctctgaggtgaagctgcaggagtccggaccaggcctggtggcacctagccagtccctgtctgtgacatgtaccgtgtccggcgtgtctctgccagactacggcgtgtcttggatcaggcagccacctaggaagggcctggagtggctgggcgtgatctggggcagcgagacaacatactataattctgccctgaagagcagactgacaatcatcaaggacaacagcaagtcccaggtgttcctgaagatgaatagcctgcagacagacgataccgccatctactattgcgccaagcactactattacggcggcagctatgccatggattactggggccagggcacatccgtgaccgtgtctagcaccacaaccccagcacctcgcccaccaacaccagcaccaaccatcgcatcccagccactgtctctgaggcccgaggcatgtaggcctgcagcaggaggcgccgtgcacaccaggggcctggactttgcctgcgatatctatatctgggcaccactggcaggaacatgtggcgtgctgctgctgtccctggtcatcaccctgtattgcaagagaggccggaagaagctgctgtacatcttcaagcagcccttcatgaggcccgtgcagacaacccaggaggaggacggctgcagctgtcggttcccagaggaggaggagggaggatgtgagctgagggtgaagttttctaggagcgccgatgcaccagcatataagcagggacagaaccagctgtacaacgagctgaatctgggcaggagagaggagtacgacgtgctggataagaggaggggaagggaccccgagatgggaggcaagccaaggagaaagaacccccaggagggcctgtataatgagctgcagaaggacaagatggccgaggcctactccgagatcggcatgaagggagagcggcgcaggggcaagggacacgatggcctgtatcagggcctgtctacagccaccaaggacacctacgatgcactgcacatgcaggccctgcctccaaggtga

SEQ ID NO: 1698 - DNA, 1782 bp, synthetic construct
  misc_feature 1..1782: note = Description of Artificial Sequence: Synthetic construct
  source 1..1782: mol_type = other DNA
atggcactgccagtgacagccctgctgctgcctctggccctgctgctgcacgcagccagacctgacatccagatgacacagaccacaagctccctgagcgcctccctgggcgacagagtgaccatctcttgccgggccagccaggatatctccaagtatctgaactggtaccagcagaagcccgatggcacagtgaagctgctgatctatcacacctctcgcctgcacagcggcgtgccttccaggttctctggcagcggctccggcacagactactctctgaccatcagcaacctggagcaggaggatatcgccacctatttctgccagcagggcaatacactgccctacacctttggcggcggcacaaagctggagatcaccggcggcggcggctctggaggaggaggcagcggcggaggaggctccgaggtgaagctgcaggagtccggaccaggcctggtggcaccatctcagagcctgtccgtgacatgtaccgtgagcggcgtgtccctgcctgactacggcgtgagctggatcagacagccacctaggaagggcctggagtggctgggcgtgatctggggctccgagacaacatactataactccgccctgaagtctcggctgaccatcatcaaggacaactctaagagccaggtgttcctgaagatgaattccctgcagacagacgataccgccatctactattgcgccaagcactactattacggcggctcctatgccatggattactggggccagggcacatctgtgaccgtgtctagcggcgtgcaggtggagacaatcagcccaggcgacggacgcacctttccaaagaggggacagacatgcgtggtgcactacaccggcatgctggaggatggcaagaaggtggactcctctagagatcggaataagccattcaagtttatgctgggcaagcaggaagtgatcagaggctgggaggagggagtggcacagatgtctgtgggacagcgggccaagctgacaatcagccctgactatgcatacggagcaaccggacacccaggaatcatcccaccacacgccacactggtgttcgatgtggagctgctgaagcctgagacaacaaccccagcacccagacctccaacacctgcaccaaccatcgcaagccagcctctgtccctgaggcccgaggcatgtaggccagcagcaggaggcgccgtgcacacccggggcctggactttgcctgcgatatctatatctgggcaccactggcaggaacatgtggcgtgctgctgctgtccctggtcatcaccctgtattgcaagcgcggcaggaagaagctgctgtacatcttcaagcagccctttatgcgccctgtgcagacaacccaggaggaggacggctgcagctgtaggttcccagaggaggaggagggaggatgtgagctgagggtgaagttttccaggtctgccgatgcccccgcctataagcagggccagaatcagctgtacaacgagctgaatctgggcaggagagaggagtacgacgtgctggataagaggaggggacgcgaccccgagatgggaggcaagcctaggagaaagaacccacaggagggcctgtataatgagctgcagaaggacaagatggccgaggcctactctgagatcggcatgaagggagagcggcgcaggggcaagggacacgatggcctgtatcagggcctgagcacagccaccaaggacacctacgatgcactgcacatgcaggccctgccacctaggtga

SEQ ID NO: 1699 - DNA, 1935 bp, synthetic construct
  misc_feature 1..1935: note = Description of Artificial Sequence: Synthetic construct
  source 1..1935: mol_type = other DNA
atggcactgcctgtgacagccctgctgctgccactggccctgctgctgcacgcagcccgccctgacatccagatgacacagaccacaagctccctgagcgcctccctgggcgacagagtgaccatcagctgccgggcctcccaggatatctctaagtatctgaactggtaccagcagaagccagatggcacagtgaagctgctgatctatcacaccagccgcctgcactccggagtgccctctaggttctctggcagcggctccggcacagactacagcctgaccatctccaacctggagcaggaggatatcgccacctatttctgccagcagggcaatacactgccatacacctttggcggcggcacaaagctggagatcaccggaggaggaggcagcggaggaggaggctccggcggcggcggctctgaggtgaagctgcaggagtccggaccaggcctggtggcaccttctcagagcctgtccgtgacatgtaccgtgtctggcgtgagcctgcccgactacggcgtgtcttggatcagacagccacctaggaagggcctggagtggctgggcgtgatctggggcagcgagacaacatactataattctgccctgaagagcaggctgaccatcatcaaggacaactctaagagccaggtgttcctgaagatgaattccctgcagacagacgataccgccatctactattgcgccaagcactactattacggcggctcttatgccatggattactggggccagggcacaagcgtgaccgtgtctagcatctccctgatcgccgccctggcagtggactacgtgatcggcatggagaacgccatgccctggaatctgcctgccgatctggcctggtttaagagaaacacactgaataagcccgtgatcatgggccggcacacctgggagtctatcggcaggcccctgcctggcaggaagaacatcatcctgtcctctcagcctggcacagacgatagagtgacctgggtgaagagcgtggacgaggcaatcgcagcatgtggcgatgtgcccgagatcatggtcatcggcggcggcagagtgatcgagcagttcctgcctaaggcccagaagctgtatctgacacacatcgacgccgaggtggagggcgacacccactttccagattacgagcccgacgattgggagtccgtgttctctgagtttcacgacgccgatgcccagaattcccactcttattgcttcgagatcctggagaggagaaccacaaccccagcaccccgcccaccaacacctgcaccaaccatcgcctcccagccactgtctctgaggcccgaggcatgtaggcctgcagcaggaggcgccgtgcacaccaggggcctggactttgcctgcgatatctacatctgggcacctctggcaggaacatgtggcgtgctgctgctgtccctggtcatcaccctgtattgcaagcgcggcaggaagaagctgctgtacatcttcaagcagccttttatgcgcccagtgcagacaacccaggaggaggacggctgcagctgtaggttccctgaggaggaggagggaggatgtgagctgagggtgaagtttagcaggtccgccgatgccccagcctataagcagggccagaaccagctgtacaacgagctgaatctgggcaggagggaagagtacgacgtgctggataagaggagaggaagggaccccgagatgggaggcaagccaaggaggaagaacccacaggagggcctgtataatgagctgcagaaggacaagatggccgaggcctacagcgagatcggcatgaagggagagaggagacggggcaagggacacgatggcctgtatcagggcctgtccacagccaccaaggacacctacgatgcactgcacatgcaggccctgcctccaaggtga

SEQ ID NO: 1700 - DNA, 1782 bp, synthetic construct
  misc_feature 1..1782: note = Description of Artificial Sequence: Synthetic construct
  source 1..1782: mol_type = other DNA
atggcactgccagtgacagccctgctgctgcctctggccctgctgctgcacgcagccagacctgacatccagatgacacagaccacaagctccctgagcgcctccctgggcgacagagtgaccatctcttgccgggccagccaggatatctccaagtatctgaactggtaccagcagaagccagatggcacagtgaagctgctgatctatcacacctctcgcctgcacagcggagtgccctccaggttctctggcagcggctccggcacagactactctctgaccatcagcaacctggagcaggaggatatcgccacctatttctgccagcagggcaatacactgccctacacctttggcggcggcacaaagctggagatcaccggcggcggcggctctggaggaggaggcagcggcggaggaggctccgaggtgaagctgcaggagtccggaccaggcctggtggcaccatctcagagcctgtccgtgacatgtaccgtgagcggcgtgtccctgcctgactacggcgtgagctggatcagacagccacctaggaagggcctggagtggctgggcgtgatctggggctccgagacaacatactataattccgccctgaagtctcggctgacaatcatcaaggacaactctaagagccaggtgtttctgaagatgaatagcctgcagacagacgataccgccatctactattgcgccaagcactactattacggcggctcctatgccatggattactggggccagggcacatctgtgaccgtgtctagcaccacaaccccagcacccagaccaccaacacctgcaccaaccatcgcaagccagcctctgtccctgcgcccagaggcatgcaggccagcagcaggaggagcagtgcacacccggggcctggacttcgcatgtgatggagtgcaggtggagacaatctccccaggcgacggcagaacctttcccaagcggggccagacatgcgtggtgcactataccggcatgctggaggatggcaagaaggtggactcctctagagatcggaacaagccattcaagtttatgctgggcaagcaggaagtgatcagaggctgggaggagggagtggcacagatgtctgtgggacagcgggccaagctgacaatcagcccagactatgcatacggagcaaccggacaccctggaatcatccctccacacgccaccctggtgttcgatgtggagctgctgaagcctgagatctacatctgggcaccactggcaggaacatgcggcgtgctgctgctgtccctggtcatcaccctgtattgtaagcgcggcaggaagaagctgctgtacatcttcaagcagccctttatgcgccctgtgcagacaacccaggaggaggacggctgcagctgtaggttccctgaggaggaggagggaggatgtgagctgagggtgaagttttccaggtctgccgatgccccagcctataagcagggccagaatcagctgtacaacgagctgaatctgggcaggagagaggagtacgacgtgctggataagaggaggggacgcgaccccgagatgggaggcaagcctaggagaaagaacccacaggagggcctgtataatgagctgcagaaggacaagatggccgaggcctactctgagatcggcatgaagggagagcggcgcaggggcaagggacacgatggcctgtatcagggcctgagcacagccaccaaggacacctacgatgcactgcacatgcaggccctgccacctaggtga

SEQ ID NO: 1701 - DNA, 1935 bp, synthetic construct
  misc_feature 1..1935: note = Description of Artificial Sequence: Synthetic construct
  source 1..1935: mol_type = other DNA
atggcactgcctgtgaccgccctgctgctgccactggccctgctgctgcacgcagcccgccctgacatccagatgacacagaccacaagctccctgagcgcctccctgggcgacagagtgaccatcagctgccgggcctcccaggatatctctaagtatctgaactggtaccagcagaagccagatggcacagtgaagctgctgatctatcacaccagccgcctgcactccggagtgccctctaggttctctggcagcggctccggcacagactacagcctgaccatctccaacctggagcaggaggatatcgccacctatttctgccagcagggcaatacactgccatacacctttggcggcggcacaaagctggagatcaccggaggaggaggcagcggaggaggaggctccggcggcggcggctctgaggtgaagctgcaggagtccggaccaggcctggtggcaccttctcagagcctgtccgtgacatgtaccgtgtctggcgtgagcctgcccgactacggcgtgtcttggatcagacagccacctaggaagggcctggagtggctgggcgtgatctggggcagcgagacaacatactataattctgccctgaagagcaggctgacaatcatcaaggacaactctaagagccaggtgtttctgaagatgaatagcctgcagacagacgataccgccatctactattgtgccaagcactactattacggcggcagctatgccatggattactggggccagggcacatccgtgaccgtgtctagcaccacaaccccagcacctcgcccaccaacaccagcaccaaccatcgcatcccagccactgtctctgcgccccgaggcatgcaggcctgcagcaggcggcgccgtgcacaccaggggcctggacttcgcctgtgatatctccctgatcgccgccctggcagtggactacgtgatcggcatggagaacgccatgccctggaatctgcctgccgatctggcctggtttaagagaaacacactgaataagcccgtgatcatgggccggcacacctgggagagcatcggcagacctctgccaggccggaagaacatcatcctgtcctctcagcctggcacagacgatagagtgacctgggtgaagtccgtggacgaggcaatcgcagcatgcggcgatgtgcccgagatcatggtcatcggcggcggcagagtgatcgagcagttcctgcctaaggcccagaagctgtatctgacacacatcgacgccgaggtggagggcgacacccactttccagattacgagcccgacgattgggagtccgtgttctctgagtttcacgacgccgatgcccagaattcccactcttattgtttcgagatcctggagagaagaatctacatctgggcacctctggcaggaacatgcggcgtgctgctgctgtctctggtcatcaccctgtattgtaagcgcggcaggaagaagctgctgtacatcttcaagcagccttttatgcgcccagtgcagacaacccaggaggaggacggctgcagctgtaggttccctgaggaggaggagggaggatgcgagctgagggtgaagtttagcaggtccgccgatgccccagcctataagcagggccagaaccagctgtacaacgagctgaatctgggcaggagggaagagtacgacgtgctggataagaggagaggaagggaccccgagatgggaggcaagccaaggaggaagaacccacaggagggcctgtataatgagctgcagaaggacaagatggccgaggcctactccgagatcggcatgaagggagagaggagacggggcaagggacacgatggcctgtatcagggcctgtctacagccaccaaggacacctacgatgcactgcacatgcaggccctgcctccaaggtga

SEQ ID NO: 1702 - DNA, 1950 bp, synthetic construct
  misc_feature 1..1950: note = Description of Artificial Sequence: Synthetic construct
  source 1..1950: mol_type = other DNA
atggcactgcctgtgaccgccctgctgctgccactggccctgctgctgcacgcagccaggcccgacatccagatgacacagaccacaagctccctgtccgcctctctgggcgacagagtgaccatcagctgccgggcctcccaggatatctctaagtatctgaactggtaccagcagaagcccgatggcacagtgaagctgctgatctatcacaccagccgcctgcactccggagtgccttctaggttcagcggctccggctctggcacagactacagcctgaccatctccaacctggagcaggaggatatcgccacctatttctgccagcagggcaatacactgccttacacctttggcggcggcacaaagctggagatcaccggaggaggaggcagcggaggaggaggctccggcggcggcggctctgaggtgaagctgcaggagtccggaccaggcctggtggcacctagccagtccctgtctgtgacatgtaccgtgtccggcgtgtctctgccagactacggcgtgtcttggatcaggcagccacctaggaagggcctggagtggctgggcgtgatctggggcagcgagacaacatactataattctgccctgaagagcagactgacaatcatcaaggacaacagcaagtcccaggtgttcctgaagatgaatagcctgcagacagacgataccgccatctactattgcgccaagcactactattacggcggcagctatgccatggattactggggccagggcacatccgtgaccgtgtctagcaccacaaccccagcacctcgcccaccaacaccagcaccaaccatcgcatcccagccactgtctctgaggcccgaggcatgtaggcctgcagcaggaggcgccgtgcacaccaggggcctggactttgcctgcgatatctatatctgggcaccactggcaggaacatgtggcgtgctgctgctgtccctggtcatcaccctgtattgcaagagaggccggaagaagctgctgtacatcttcaagcagcccttcatgaggcccgtgcagacaacccaggaggaggacggctgcagctgtcggttcccagaggaggaggagggaggatgtgagctgagggtgaagttttctaggagcgccgatgcaccagcatataagcagggacagaaccagctgtacaacgagctgaatctgggcaggagagaggagtacgacgtgctggataagaggaggggaagggaccccgagatgggaggcaagccaaggagaaagaacccccaggagggcctgtataatgagctgcagaaggacaagatggccgaggcctactccgagatcggcatgaagggagagcggcgcaggggcaagggacacgatggcctgtatcagggcctgtctacagccaccaaggacacctacgatgcactgcacatgcaggccctgcctccaaggggaggcagcggaggaatctccctgatcgccgccctggcagtggaccacgtgatcggcatggagaacgccatgccatggaatctgcccgccgatctggcctggttcaagcggaacaccctgaataagccagtgatcatgggcagacacacatgggagtctatcggcaggcccctgcctggacgcaagaacatcatcctgagctcccagcccggcaccgacgatagggtgacatgggtgaagtccgtggacgaggcaatcgcagcatgcggcgatgtgcccgagatcatggtcatcggcggcggcagagtgtacgagcagttcctgcctaaggcccagaagctgtatctgacccacatcgacgccgaggtggagggcgacacacactttcctgattacaagccagacgattgggagtccgtgttctctgagtttcacgacgccgatgcccagaattctcacagctattgttttgagatcctggagcggagatga

SEQ ID NO: 1703 - DNA, 1797 bp, synthetic construct
  misc_feature 1..1797: note = Description of Artificial Sequence: Synthetic construct
  source 1..1797: mol_type = other DNA
atggcactgcctgtgaccgccctgctgctgccactggccctgctgctgcacgcagccaggcccgacatccagatgacacagaccacaagctccctgtccgcctctctgggcgacagagtgaccatcagctgccgggcctcccaggatatctctaagtatctgaactggtaccagcagaagcccgatggcacagtgaagctgctgatctatcacaccagccgcctgcactccggagtgccttctaggttcagcggctccggctctggcacagactacagcctgaccatctccaacctggagcaggaggatatcgccacctatttctgccagcagggcaatacactgccttacacctttggcggcggcacaaagctggagatcaccggaggaggaggcagcggaggaggaggctccggcggcggcggctctgaggtgaagctgcaggagtccggaccaggcctggtggcacctagccagtccctgtctgtgacatgtaccgtgtccggcgtgtctctgccagactacggcgtgtcttggatcaggcagccacctaggaagggcctggagtggctgggcgtgatctggggcagcgagacaacatactataattctgccctgaagagcagactgacaatcatcaaggacaacagcaagtcccaggtgttcctgaagatgaatagcctgcagacagacgataccgccatctactattgcgccaagcactactattacggcggcagctatgccatggattactggggccagggcacatccgtgaccgtgtctagcaccacaaccccagcacctcgcccaccaacaccagcaccaaccatcgcatcccagccactgtctctgaggcccgaggcatgtaggcctgcagcaggaggcgccgtgcacaccaggggcctggactttgcctgcgatatctatatctgggcaccactggcaggaacatgtggcgtgctgctgctgtccctggtcatcaccctgtattgcaagagaggccggaagaagctgctgtacatcttcaagcagcccttcatgaggcccgtgcagacaacccaggaggaggacggctgcagctgtcggttcccagaggaggaggagggaggatgtgagctgagggtgaagttttctaggagcgccgatgcaccagcatataagcagggacagaaccagctgtacaacgagctgaatctgggcaggagagaggagtacgacgtgctggataagaggaggggaagggaccccgagatgggaggcaagccaaggagaaagaacccccaggagggcctgtataatgagctgcagaaggacaagatggccgaggcctactccgagatcggcatgaagggagagcggcgcaggggcaagggacacgatggcctgtatcagggcctgtctacagccaccaaggacacctacgatgcactgcacatgcaggccctgcctccaaggggaggctctggaggaggagtgcaggtggagacaatcagcccaggcgacggaaggacattcccaaagaggggacagacctgcgtggtgcactacacaggcatgctgggcgatggcaagaaggtggacagctcccgggatagaaacaagcccttcaagtttatgctgggcaagcaggaagtgatcaggggatgggaggagggagtggcacagatgtccgtgggacagggcgccaagctgaccatctctcctgactacgcctatggagcaacaggacacccaggaatcatcccacctcacgccaccctggtgtttgatgtggagctgctggagctggagtga

SEQ ID NO: 1704 - DNA, 2034 bp, synthetic construct; identical to SEQ ID NO: 165
  misc_feature 1..2034: note = Description of Artificial Sequence: Synthetic construct
  source 1..2034: mol_type = other DNA

SEQ ID NO: 1705 - DNA, 2034 bp, synthetic construct; identical to SEQ ID NO: 166
  misc_feature 1..2034: note = Description of Artificial Sequence: Synthetic construct
  source 1..2034: mol_type = other DNA

SEQ ID NO: 1706 - DNA, 2034 bp, synthetic construct; identical to SEQ ID NO: 167
  misc_feature 1..2034: note = Description of Artificial Sequence: Synthetic construct
  source 1..2034: mol_type = other DNA

SEQ ID NO: 1707 - DNA, 2034 bp, synthetic construct
  misc_feature 1..2034: note = Description of Artificial Sequence: Synthetic construct
  source 1..2034: mol_type = other DNA
atggcactgcctgtgaccgccctgctgctgccactggccctgctgctgcacgcagccaggcccgacatccagatgacacagaccacaagctccctgtccgcctctctgggcgacagagtgaccatcagctgccgggcctcccaggatatctctaagtatctgaactggtaccagcagaagcccgatggcacagtgaagctgctgatctatcacaccagccgcctgcactccggagtgccttctaggttcagcggctccggctctggcacagactacagcctgaccatctccaacctggagcaggaggatatcgccacctatttctgccagcagggcaatacactgccttacacctttggcggcggcacaaagctggagatcaccggaggaggaggcagcggaggaggaggctccggcggcggcggctctgaggtgaagctgcaggagtccggaccaggcctggtggcacctagccagtccctgtctgtgacatgtaccgtgtccggcgtgtctctgccagactacggcgtgtcttggatcaggcagccacctaggaagggcctggagtggctgggcgtgatctggggcagcgagacaacatactataattctgccctgaagagcagactgacaatcatcaaggacaacagcaagtcccaggtgttcctgaagatgaatagcctgcagacagacgataccgccatctactattgcgccaagcactactattacggcggcagctatgccatggattactggggccagggcacatccgtgaccgtgtctagcaccacaaccccagcacctcgcccaccaacaccagcaccaaccatcgcatcccagccactgtctctgaggcccgaggcatgtaggcctgcagcaggaggcgccgtgcacaccaggggcctggactttgcctgcgatatctatatctgggcaccactggcaggaacatgtggcgtgctgctgctgtccctggtcatcaccctgtattgcaagagaggccggaagaagctgctgtacatcttcaagcagcccttcatgaggcccgtgcagacaacccaggaggaggacggctgcagctgtcggttcccagaggaggaggagggaggatgtgagctgagggtgaagttttctaggagcgccgatgcaccagcatataagcagggacagaaccagctgtacaacgagctgaatctgggcaggagagaggagtacgacgtgctggataagaggaggggaagggaccccgagatgggaggcaagccaaggagaaagaacccccaggagggcctgtataatgagctgcagaaggacaagatggccgaggcctactccgagatcggcatgaagggagagcggcgcaggggcaagggacacgatggcctgtatcagggcctgtctacagccaccaaggacacctacgatgcactgcacatgcaggccctgcctccaaggggaggcagcggaggagtgggctccctgaactgcatcgtggccgtgagccagaacatgggcatcggcaagaatggcgacctgccttggccacctctgaggaacgagttcagatactttttcaggatgaccacaaccagctccgtggagggcaagcagaacctggtcatcatgggcaagaagacatggttctctatccccgagaagttccgccctctgaagggccggatcaatctggtgctgagcagagagctgaaggagccaccacagggagcacacttcctgagccggagcctggacgatgccctgaagctgaccgagcagcccgagctggccaacaaggtggacatggtgtggatcgtgggcggctctagcgtgatcaaggaggccatgaatcacccaggccacctgaagctgttcgtgacaagaatcatgcaggactttgagtccgataccttctttcccgagatcgacctggagaagtacaagctgctgcctgagtatccaggcgtgctgtctgatgtgcaggaggagaagggcatcaagtacaagttcgaggtgtatgagaagaatgattga

SEQ ID NO: 1708 - DNA, 1824 bp, synthetic construct
  misc_feature 1..1824: note = Description of Artificial Sequence: Synthetic construct
  source 1..1824: mol_type = other DNA
atggcactgcctgtgaccgccctgctgctgccactggccctgctgctgcacgcagccaggccttctggaggcgtgcaggtggagacaatcagcccaggcgacggacgcaccttcccaaagaggggacagacatgcgtggtgcactacaccggcatgctggaggatggcaagaaggtggacagctccagagatcggaacaagccattcaagtttatgctgggcaagcaggaagtgatcagaggatgggaggagggagtggcacagatgagcgtgggacagcgggccaagctgacaatctcccctgactatgcatacggagcaaccggacacccaggaatcatcccacctcacgccacactggtgttcgacgtggagctgctgaagcctgaggagtccaggagagtgcggcgcaacaagcggtctaaggatatccagatgacacagaccacaagctccctgtccgcctctctgggcgacagagtgaccatcagctgccgggcctcccaggatatctctaagtatctgaactggtaccagcagaagcccgatggcacagtgaagctgctgatctatcacaccagccgcctgcactccggagtgccttctaggttcagcggctccggctctggcacagactacagcctgaccatctccaacctggagcaggaggatatcgccacctatttctgccagcagggcaatacactgccttacacctttggcggcggcacaaagctggagatcaccggaggaggaggcagcggaggaggaggctccggcggcggcggctctgaggtgaagctgcaggagtccggaccaggcctggtggcacctagccagtccctgtctgtgacatgtaccgtgtccggcgtgtctctgccagactacggcgtgtcttggatcaggcagccacctaggaagggcctggagtggctgggcgtgatctggggcagcgagacaacatactataattctgccctgaagagcagactgacaatcatcaaggacaacagcaagtcccaggtgttcctgaagatgaatagcctgcagacagacgataccgccatctactattgcgccaagcactactattacggcggcagctatgccatggattactggggccagggcacatccgtgaccgtgtctagcaccacaaccccagcacctcgcccaccaacaccagcaccaaccatcgcatcccagccactgtctctgaggcccgaggcatgtaggcctgcagcaggaggcgccgtgcacaccaggggcctggactttgcctgcgatatctatatctgggcaccactggcaggaacatgtggcgtgctgctgctgtccctggtcatcaccctgtattgcaagagaggccggaagaagctgctgtacatcttcaagcagcccttcatgaggcccgtgcagacaacccaggaggaggacggctgcagctgtcggttcccagaggaggaggagggaggatgtgagctgagggtgaagttttctaggagcgccgatgcaccagcatataagcagggacagaaccagctgtacaacgagctgaatctgggcaggagagaggagtacgacgtgctggataagaggaggggaagggaccccgagatgggaggcaagccaaggagaaagaacccccaggagggcctgtataatgagctgcagaaggacaagatggccgaggcctactccgagatcggcatgaagggagagcggcgcaggggcaagggacacgatggcctgtatcagggcctgtctacagccaccaaggacacctacgatgcactgcacatgcaggccctgcctccaaggtga

SEQ ID NO: 1709 - DNA, 1977 bp, synthetic construct
  misc_feature 1..1977: note = Description of Artificial Sequence: Synthetic construct
  source 1..1977: mol_type = other DNA
atggcactgcctgtgaccgccctgctgctgccactggccctgctgctgcacgcagccaggccttctggaatcagcctgatcgccgccctggcagtggactacgtgatcggcatggagaacgccatgccctggaatctgcctgccgatctggcctggttcaagagaaacacactgaataagcccgtgatcatgggccggcacacctgggagtccatcggcaggcccctgcctggcaggaagaacatcatcctgagctcccagcctggcacagacgatagagtgacctgggtgaagagcgtggacgaggcaatcgcagcatgcggcgatgtgcccgagatcatggtcatcggcggcggcagagtgatcgagcagttcctgcctaaggcccagaagctgtatctgacacacatcgacgccgaggtggagggcgacacccactttccagattacgagcccgacgattgggagtccgtgttctctgagtttcacgacgccgatgcccagaacagccactcctactgcttcgagatcctggagaggagagagtctcggcgcgtgaggagaaataagagaagcaaggacatccagatgacacagaccacaagctccctgtccgcctctctgggcgacagagtgaccatcagctgccgggcctcccaggatatctctaagtatctgaactggtaccagcagaagcccgatggcacagtgaagctgctgatctatcacaccagccgcctgcactccggagtgccttctaggttcagcggctccggctctggcacagactacagcctgaccatctccaacctggagcaggaggatatcgccacctatttctgccagcagggcaatacactgccttacacctttggcggcggcacaaagctggagatcaccggaggaggaggcagcggaggaggaggctccggcggcggcggctctgaggtgaagctgcaggagtccggaccaggcctggtggcacctagccagtccctgtctgtgacatgtaccgtgtccggcgtgtctctgccagactacggcgtgtcttggatcaggcagccacctaggaagggcctggagtggctgggcgtgatctggggcagcgagacaacatactataattctgccctgaagagcagactgacaatcatcaaggacaacagcaagtcccaggtgttcctgaagatgaatagcctgcagacagacgataccgccatctactattgcgccaagcactactattacggcggcagctatgccatggattactggggccagggcacatccgtgaccgtgtctagcaccacaaccccagcacctcgcccaccaacaccagcaccaaccatcgcatcccagccactgtctctgaggcccgaggcatgtaggcctgcagcaggaggcgccgtgcacaccaggggcctggactttgcctgcgatatctatatctgggcaccactggcaggaacatgtggcgtgctgctgctgtccctggtcatcaccctgtattgcaagagaggccggaagaagctgctgtacatcttcaagcagcccttcatgaggcccgtgcagacaacccaggaggaggacggctgcagctgtcggttcccagaggaggaggagggaggatgtgagctgagggtgaagttttctaggagcgccgatgcaccagcatataagcagggacagaaccagctgtacaacgagctgaatctgggcaggagagaggagtacgacgtgctggataagaggaggggaagggaccccgagatgggaggcaagccaaggagaaagaacccccaggagggcctgtataatgagctgcagaaggacaagatggccgaggcctactccgagatcggcatgaagggagagcggcgcaggggcaagggacacgatggcctgtatcagggcctgtctacagccaccaaggacacctacgatgcactgcacatgcaggccctgcctccaaggtga

SEQ ID NO: 1710 - DNA, 2061 bp, synthetic construct; identical to SEQ ID NO: 176
  misc_feature 1..2061: note = Description of Artificial Sequence: Synthetic construct
  source 1..2061: mol_type = other DNA

SEQ ID NO: 1711 - DNA, 2061 bp, synthetic construct; identical to SEQ ID NO: 177
  misc_feature 1..2061: note = Description of Artificial Sequence: Synthetic construct
  source 1..2061: mol_type = other DNA

SEQ ID NO: 1712 - DNA, 2034 bp, synthetic construct; identical to SEQ ID NO: 165
  misc_feature 1..2034: note = Description of Artificial Sequence: Synthetic polynucleotide
  source 1..2034: mol_type = other DNA

SEQ ID NO: 1713 - DNA, 1467 bp, synthetic construct
  misc_feature 1..1467: note = Description of Artificial Sequence: Synthetic polynucleotide
  source 1..1467: mol_type = other DNA
atggcactgcctgtgaccgccctgctgctgccactggccctgctgctgcacgcagccaggcccgacatccagatgacacagaccacaagctccctgtccgcctctctgggcgacagagtgaccatcagctgccgggcctcccaggatatctctaagtatctgaactggtaccagcagaagcccgatggcacagtgaagctgctgatctatcacaccagccgcctgcactccggagtgccttctaggttcagcggctccggctctggcacagactacagcctgaccatctccaacctggagcaggaggatatcgccacctatttctgccagcagggcaatacactgccttacacctttggcggcggcacaaagctggagatcaccggaggaggaggcagcggaggaggaggctccggcggcggcggctctgaggtgaagctgcaggagtccggaccaggcctggtggcacctagccagtccctgtctgtgacatgtaccgtgtccggcgtgtctctgccagactacggcgtgtcttggatcaggcagccacctaggaagggcctggagtggctgggcgtgatctggggcagcgagacaacatactataattctgccctgaagagcagactgacaatcatcaaggacaacagcaagtcccaggtgttcctgaagatgaatagcctgcagacagacgataccgccatctactattgcgccaagcactactattacggcggcagctatgccatggattactggggccagggcacatccgtgaccgtgtctagcaccacaaccccagcacctcgcccaccaacaccagcaccaaccatcgcatcccagccactgtctctgaggcccgaggcatgtaggcctgcagcaggaggcgccgtgcacaccaggggcctggactttgcctgcgatatctatatctgggcaccactggcaggaacatgtggcgtgctgctgctgtccctggtcatcaccctgtattgcaagagaggccggaagaagctgctgtacatcttcaagcagcccttcatgaggcccgtgcagacaacccaggaggaggacggctgcagctgtcggttcccagaggaggaggagggaggatgtgagctgagggtgaagttttctaggagcgccgatgcaccagcatataagcagggacagaaccagctgtacaacgagctgaatctgggcaggagagaggagtacgacgtgctggataagaggaggggaagggaccccgagatgggaggcaagccaaggagaaagaacccccaggagggcctgtataatgagctgcagaaggacaagatggccgaggcctactccgagatcggcatgaagggagagcggcgcaggggcaagggacacgatggcctgtatcagggcctgtctacagccaccaaggacacctacgatgcactgcacatgcaggccctgcctccaaggggatcctga

SEQ ID NO: 1714 - DNA, 1527 bp, synthetic construct
  misc_feature 1..1527: note = Description of Artificial Sequence: Synthetic polynucleotide
  source 1..1527: mol_type = other DNA
atggcactgcctgtgaccgccctgctgctgccactggccctgctgctgcacgcagccaggcccgacatccagatgacacagaccacaagctccctgtccgcctctctgggcgacagagtgaccatcagctgccgggcctcccaggatatctctaagtatctgaactggtaccagcagaagcccgatggcacagtgaagctgctgatctatcacaccagccgcctgcactccggagtgccttctaggttcagcggctccggctctggcacagactacagcctgaccatctccaacctggagcaggaggatatcgccacctatttctgccagcagggcaatacactgccttacacctttggcggcggcacaaagctggagatcaccggaggaggaggcagcggaggaggaggctccggcggcggcggctctgaggtgaagctgcaggagtccggaccaggcctggtggcacctagccagtccctgtctgtgacatgtaccgtgtccggcgtgtctctgccagactacggcgtgtcttggatcaggcagccacctaggaagggcctggagtggctgggcgtgatctggggcagcgagacaacatactataattctgccctgaagagcagactgacaatcatcaaggacaacagcaagtcccaggtgttcctgaagatgaatagcctgcagacagacgataccgccatctactattgcgccaagcactactattacggcggcagctatgccatggattactggggccagggcacatccgtgaccgtgtctagcaccacaaccccagcacctcgcccaccaacaccagcaccaaccatcgcatcccagccactgtctctgaggcccgaggcatgtaggcctgcagcaggaggcgccgtgcacaccaggggcctggactttgcctgcgatatctatatctgggcaccactggcaggaacatgtggcgtgctgctgctgtccctggtcatcaccctgtattgcaagagaggccggaagaagctgctgtacatcttcaagcagcccttcatgaggcccgtgcagacaacccaggaggaggacggctgcagctgtcggttcccagaggaggaggagggaggatgtgagctgagggtgaagttttctaggagcgccgatgcaccagcatataagcagggacagaaccagctgtacaacgagctgaatctgggcaggagagaggagtacgacgtgctggataagaggaggggaagggaccccgagatgggaggcaagccaaggagaaagaacccccaggagggcctgtataatgagctgcagaaggacaagatggccgaggcctactccgagatcggcatgaagggagagcggcgcaggggcaagggacacgatggcctgtatcagggcctgtctacagccaccaaggacacctacgatgcactgcacatgcaggccctgcctccaaggggagctactaacttcagcctgctgaagcaggctggagacgtggaggagaaccctggacctggatcctga

SEQ ID NO: 1715 - DNA, 1494 bp, synthetic construct
  misc_feature 1..1494: note = Description of Artificial Sequence: Synthetic polynucleotide
  source 1..1494: mol_type = other DNA
atggcactgcctgtgaccgccctgctgctgccactggccctgctgctgcacgcagccaggccctatccttacgatgtgcccgactatgctgacatccagatgacacagaccacaagctccctgtccgcctctctgggcgacagagtgaccatcagctgccgggcctcccaggatatctctaagtatctgaactggtaccagcagaagcccgatggcacagtgaagctgctgatctatcacaccagccgcctgcactccggagtgccttctaggttcagcggctccggctctggcacagactacagcctgaccatctccaacctggagcaggaggatatcgccacctatttctgccagcagggcaatacactgccttacacctttggcggcggcacaaagctggagatcaccggaggaggaggcagcggaggaggaggctccggcggcggcggctctgaggtgaagctgcaggagtccggaccaggcctggtggcacctagccagtccctgtctgtgacatgtaccgtgtccggcgtgtctctgccagactacggcgtgtcttggatcaggcagccacctaggaagggcctggagtggctgggcgtgatctggggcagcgagacaacatactataattctgccctgaagagcagactgacaatcatcaaggacaacagcaagtcccaggtgttcctgaagatgaatagcctgcagacagacgataccgccatctactattgcgccaagcactactattacggcggcagctatgccatggattactggggccagggcacatccgtgaccgtgtctagcaccacaaccccagcacctcgcccaccaacaccagcaccaaccatcgcatcccagccactgtctctgaggcccgaggcatgtaggcctgcagcaggaggcgccgtgcacaccaggggcctggactttgcctgcgatatctatatctgggcaccactggcaggaacatgtggcgtgctgctgctgtccctggtcatcaccctgtattgcaagagaggccggaagaagctgctgtacatcttcaagcagcccttcatgaggcccgtgcagacaacccaggaggaggacggctgcagctgtcggttcccagaggaggaggagggaggatgtgagctgagggtgaagttttctaggagcgccgatgcaccagcatataagcagggacagaaccagctgtacaacgagctgaatctgggcaggagagaggagtacgacgtgctggataagaggaggggaagggaccccgagatgggaggcaagccaaggagaaagaacccccaggagggcctgtataatgagctgcagaaggacaagatggccgaggcctactccgagatcggcatgaagggagagcggcgcaggggcaagggacacgatggcctgtatcagggcctgtctacagccaccaaggacacctacgatgcactgcacatgcaggccctgcctccaaggggatcctga

SEQ ID NO: 1716 - DNA, 1509 bp, synthetic construct
  misc_feature 1..1509: note = Description of Artificial Sequence: Synthetic polynucleotide
  source 1..1509: mol_type = other DNA
atggcactgcctgtgaccgccctgctgctgccactggccctgctgctgcacgcagccaggcccgacatccagatgacacagaccacaagctccctgtccgcctctctgggcgacagagtgaccatcagctgccgggcctcccaggatatctctaagtatctgaactggtaccagcagaagcccgatggcacagtgaagctgctgatctatcacaccagccgcctgcactccggagtgccttctaggttcagcggctccggctctggcacagactacagcctgaccatctccaacctggagcaggaggatatcgccacctatttctgccagcagggcaatacactgccttacacctttggcggcggcacaaagctggagatcaccggaggaggaggcagcggaggaggaggctccggcggcggcggctctgaggtgaagctgcaggagtccggaccaggcctggtggcacctagccagtccctgtctgtgacatgtaccgtgtccggcgtgtctctgccagactacggcgtgtcttggatcaggcagccacctaggaagggcctggagtggctgggcgtgatctggggcagcgagacaacatactataattctgccctgaagagcagactgacaatcatcaaggacaacagcaagtcccaggtgttcctgaagatgaatagcctgcagacagacgataccgccatctactattgcgccaagcactactattacggcggcagctatgccatggattactggggccagggcacatccgtgaccgtgtctagcaccacaaccccagcacctcgcccaccaacaccagcaccaaccatcgcatcccagccactgtctctgaggcccgaggcatgtaggcctgcagcaggaggcgccgtgcacaccaggggcctggactttgcctgcgatatctatatctgggcaccactggcaggaacatgtggcgtgctgctgctgtccctggtcatcaccctgtattgcaagagaggccggaagaagctgctgtacatcttcaagcagcccttcatgaggcccgtgcagacaacccaggaggaggacggctgcagctgtcggttcccagaggaggaggagggaggatgtgagctgagggtgaagttttctaggagcgccgatgcaccagcatataagcagggacagaaccagctgtacaacgagctgaatctgggcaggagagaggagtacgacgtgctggataagaggaggggaagggaccccgagatgggaggcaagccaaggagaaagaacccccaggagggcctgtataatgagctgcagaaggacaagatggccgaggcctactccgagatcggcatgaagggagagcggcgcaggggcaagggacacgatggcctgtatcagggcctgtctacagccaccaaggacacctacgatgcactgcacatgcaggccctgcctccaaggagtggtgagtccaggagagtgcggcgcaacaagaggagcaagggatcctga

SEQ ID NO: 1717 - DNA, 1509 bp, synthetic construct; identical to SEQ ID NO: 1716
  misc_feature 1..1509: note = Description of Artificial Sequence: Synthetic polynucleotide
  source 1..1509: mol_type = other DNA

SEQ ID NO: 1718 - DNA, 3158 bp, synthetic construct
  misc_feature 1..3158: note = Description of Artificial Sequence: Synthetic polynucleotide
  source 1..3158: mol_type = other DNA
atggccttaccagtgaccgccttgctcctgccgctggccttgctgctccacgccgccaggccggacatccagatgacacagactacatcctccctgtctgcctctctgggagacagagtcaccatcagttgcagggcaagtcaggacattagtaaatatttaaattggtatcagcagaaaccagatggaactgttaaactcctgatctaccatacatcaagattacactcaggagtcccatcaaggttcagtggcagtgggtctggaacagattattctctcaccattagcaacctggagcaagaagatattgccacttacttttgccaacagggtaatacgcttccgtacacgttcggaggggggaccaagctggagatcacaggtggcggtggctcgggcggtggtgggtcgggtggcggcggatctgaggtgaaactgcaggagtcaggacctggcctggtggcgccctcacagagcctgtccgtcacatgcactgtctcaggggtctcattacccgactatggtgtaagctggattcgccagcctccacgaaagggtctggagtggctgggagtaatatggggtagtgaaaccacatactataattcagctctcaaatccagactgaccatcatcaaggacaactccaagagccaagttttcttaaaaatgaacagtctgcaaactgatgacacagccatttactactgtgccaaacattattactacggtggtagctatgctatggactactggggccaaggaacctcagtcaccgtctcctcaaccacgacgccagcgccgcgaccaccaacaccggcgcccaccatcgcgtcgcagcccctgtccctgcgcccagaggcgtgccggccagcggcggggggcgcagtgcacacgagggggctggacttcgcctgtgatatctacatctgggcgcccttggccgggacttgtggggtccttctcctgtcactggttatcaccctttactgcaaacggggcagaaagaaactcctgtatatattcaaacaaccatttatgagaccagtacaaactactcaagaggaagatggctgtagctgccgatttccagaagaagaagaaggaggatgtgaactgagagtgaagttcagcaggagcgcagacgcccccgcgtacaagcagggccagaaccagctctataacgagctcaatctaggacgaagagaggagtacgatgttttggacaagagacgtggccgggaccctgagatggggggaaagccgagaaggaagaaccctcaggaaggcctgtacaatgaactgcagaaagataagatggcggaggcctacagtgagattgggatgaaaggcgagcgccggaggggcaaggggcacgatggcctttaccagggtctcagtacagccaccaaggacacctacgacgcccttcacatgcaggccctgccccctcgcacgcgttatccgtacgacgtaccagactacgcaggagtgcaggtggaaaccatctccccaggagacgggcgcaccttccccaagcgcggccagacctgcgtggtgcactacaccgggatgcttggagatggaaagaaagttgactcctcccgggacagaaacaagccctttaagtttatgctaggcaagcaggaggtgatccgaggctgggaagaaggggttgcccagatgagtgtgggtcagggagccaaactgactatatctccagattatgcctatggtgccactgggcacccaggcatcatcccaccacatgccactctcgtcttcgatgtggagcttctagaactggaatgaatgcatcgatccgcggcggccgctacgtaaattccgccccccccccccctctccctcccccccccctaacgttactggccgaagccgcttggaataaggccggtgtgcgtttgtctatatgttattttccaccatattgccgtcttttggcaatgtgagggcccggaaacctggccctgtcttcttgacgagcattcctaggggtctttcccctctcgccaaaggaatgcaaggtctgttgaatgtcgtgaaggaagcagttcctctggaagcttcttgaagacaaacaacgtctgtagcgaccctttgcaggcagcggaaccccccacctggcgacaggtgcctctgcggccaaaagccacgtgtataagatacacctgcaaaggcggcacaaccccagtgccacgttgtgagttggatagttgtggaaagagtcaaatggctctcctcaagcgtattcaacaaggggctgaaggatgcccagaaggtaccccattgtatgggatctgatctggggcctcggtgcacatgctttacatgtgtttagtcgaggttaaaaaaacgtctaggccccccgaaccacggggacgtggttttcctttgaaaaacacgatgataatatggccacaaccatgatgagcaagggcgaggaggataacatggccatcatcaaggagttcatgcgcttcaaggtgcacatggagggctccgtgaacggccacgagttcgagatcgagggcgagggcgagggccgcccctacgagggcacccagaccgccaagctgaaggtgaccaagggtggccccctgcccttcgcctgggacatcctgtcccctcagttcatgtacggctccaaggcctacgtgaagcaccccgccgacatccccgactacttgaagctgtccttccccgagggcttcaagtgggagcgcgtgatgaacttcgaggacggcggcgtggtgaccgtgacccaggactcctccctgcaggacggcgagttcatctacaaggtgaagctgcgcggcaccaacttcccctccgacggccccgtaatgcagaagaagaccatgggctgggaggcctcctccgagcggatgtaccccgaggacggcgccctgaagggcgagatcaagcagaggctgaagctgaaggacggcggccactacgacgctgaggtcaagaccacctacaaggccaagaagcccgtgcagctgcccggcgcctacaacgtcaacatcaagttggacatcacctcccacaacgaggactacaccatcgtggaacagtacgaacgcgccgagggccgccactccaccggcggcatggacgagctgtacaagtaa

SEQ ID NO: 1719 - DNA, 2232 bp, synthetic construct
  misc_feature 1..2232: note = Description of Artificial Sequence: Synthetic polynucleotide
  source 1..2232: mol_type = other DNA
atggccttaccagtgaccgccttgctcctgccgctggccttgctgctccacgccgccaggccggacatccagatgacacagactacatcctccctgtctgcctctctgggagacagagtcaccatcagttgcagggcaagtcaggacattagtaaatatttaaattggtatcagcagaaaccagatggaactgttaaactcctgatctaccatacatcaagattacactcaggagtcccatcaaggttcagtggcagtgggtctggaacagattattctctcaccattagcaacctggagcaagaagatattgccacttacttttgccaacagggtaatacgcttccgtacacgttcggaggggggaccaagctggagatcacaggtggcggtggctcgggcggtggtgggtcgggtggcggcggatctgaggtgaaactgcaggagtcaggacctggcctggtggcgccctcacagagcctgtccgtcacatgcactgtctcaggggtctcattacccgactatggtgtaagctggattcgccagcctccacgaaagggtctggagtggctgggagtaatatggggtagtgaaaccacatactataattcagctctcaaatccagactgaccatcatcaaggacaactccaagagccaagttttcttaaaaatgaacagtctgcaaactgatgacacagccatttactactgtgccaaacattattactacggtggtagctatgctatggactactggggccaaggaacctcagtcaccgtctcctcaaccacgacgccagcgccgcgaccaccaacaccggcgcccaccatcgcgtcgcagcccctgtccctgcgcccagaggcgtgccggccagcggcggggggcgcagtgcacacgagggggctggacttcgcctgtgatatctacatctgggcgcccttggccgggacttgtggggtccttctcctgtcactggttatcaccctttactgcaaacggggcagaaagaaactcctgtatatattcaaacaaccatttatgagaccagtacaaactactcaagaggaagatggctgtagctgccgatttccagaagaagaagaaggaggatgtgaactgagagtgaagttcagcaggagcgcagacgcccccgcgtacaagcagggccagaaccagctctataacgagctcaatctaggacgaagagaggagtacgatgttttggacaagagacgtggccgggaccctgagatggggggaaagccgagaaggaagaaccctcaggaaggcctgtacaatgaactgcagaaagataagatggcggaggcctacagtgagattgggatgaaaggcgagcgccggaggggcaaggggcacgatggcctttaccagggtctcagtacagccaccaaggacacctacgacgcccttcacatgcaggccctgccccctcgcggatccggagctactaacttcagcctgctgaagcaggctggagacgtggaggagaaccctggacctttgagcaagggcgaggaggacaacatggccatcatcaaggagttcatgcgcttcaaggtgcacatggagggctccgtgaacggccacgagttcgagatcgagggcgagggcgagggccgcccctacgagggcacccagaccgccaagctgaaggtgaccaagggcggccccctgcccttcgcctgggacatcctgtcccctcagttcatgtacggctccaaggcctacgtgaagcaccccgccgacatccccgactacttgaagctgtccttccccgagggcttcaagtgggagcgcgtgatgaacttcgaggacggcggcgtggtgaccgtgacccaggactcctccctgcaggacggcgagttcatctacaaggtgaagctgcgcggcaccaacttcccctccgacggccccgtaatgcagaagaagaccatgggctgggaggcctcctccgagcggatgtaccccgaggacggcgccctgaagggcgagatcaagcagaggctgaagctgaaggacggcggccactacgacgccgaggtcaagaccacctacaaggccaagaagcccgtgcagctgcccggcgcctacaacgtcaacatcaagctggacatcacctcccacaacgaggactacaccatcgtggaacagtacgagcgcgccgagggccgccactccaccggcggcatggacgagctgtacaagtaa

SEQ ID NO: 1720 - DNA, 2658 bp, synthetic construct
  misc_feature 1..2658: note = Description of Artificial Sequence: Synthetic polynucleotide
  source 1..2658: mol_type = other DNA
atggcactgcctgtgaccgccctgctgctgccactggccctgctgctgcacgcagccaggcccgacatccagatgacacagaccacaagctccctgtccgcctctctgggcgacagagtgaccatcagctgccgggcctcccaggatatctctaagtatctgaactggtaccagcagaagcccgatggcacagtgaagctgctgatctatcacaccagccgcctgcactccggagtgccttctaggttcagcggctccggctctggcacagactacagcctgaccatctccaacctggagcaggaggatatcgccacctatttctgccagcagggcaatacactgccttacacctttggcggcggcacaaagctggagatcaccggaggaggaggcagcggaggaggaggctccggcggcggcggctctgaggtgaagctgcaggagtccggaccaggcctggtggcacctagccagtccctgtctgtgacatgtaccgtgtccggcgtgtctctgccagactacggcgtgtcttggatcaggcagccacctaggaagggcctggagtggctgggcgtgatctggggcagcgagacaacatactataattctgccctgaagagcagactgacaatcatcaaggacaacagcaagtcccaggtgttcctgaagatgaatagcctgcagacagacgataccgccatctactattgcgccaagcactactattacggcggcagctatgccatggattactggggccagggcacatccgtgaccgtgtctagcaccacaaccccagcacctcgcccaccaacaccagcaccaaccatcgcatcccagccactgtctctgaggcccgaggcatgtaggcctgcagcaggaggcgccgtgcacaccaggggcctggactttgcctgcgatatctatatctgggcaccactggcaggaacatgtggcgtgctgctgctgtccctggtcatcaccctgtattgcaagagaggccggaagaagctgctgtacatcttcaagcagcccttcatgaggcccgtgcagacaacccaggaggaggacggctgcagctgtcggttcccagaggaggaggagggaggatgtgagctgagggtgaagttttctaggagcgccgatgcaccagcatataagcagggacagaaccagctgtacaacgagctgaatctgggcaggagagaggagtacgacgtgctggataagaggaggggaagggaccccgagatgggaggcaagccaaggagaaagaacccccaggagggcctgtataatgagctgcagaaggacaagatggccgaggcctactccgagatcggcatgaagggagagcggcgcaggggcaagggacacgatggcctgtatcagggcctgtctacagccaccaaggacacctacgatgcactgcacatgcaggccctgcctccaaggggttcaggagctactaacttcagcctgctgaagcaggctggagacgtggaggagaaccctggacctaactgggtgaacgtgatctccgacctgaaaaagatcgaggatttgatccagagcatgcacattgacgccaccctgtataccgagtccgacgtgcacccgagttgcaaggtgactgccatgaagtgcttcctgctggagctgcaagtgatcagcctggagagcggcgacgccagcatccacgacaccgtggaaaaccttatcattctggccaacaatagcctgagcagcaacggcaacgtgaccgaaagcggatgtaaggaatgcgaggaactggaagagaagaatatcaaagaattcctgcaaagcttcgtgcacatcgtgcagatgttcatcaacacttcttcaggtggcggtagtggtgggggaggatctggaggcggaggaagcgggggtggaggttcaggaggagggagcttgcaaattacctgcccccctccgatgagcgtggagcacgccgacatctgggtcaagagctacagcttgtatagtagggagcggtacatctgtaacagcgggttcaagaggaaggccgggaccagctcactgaccgagtgcgtgttgaacaaggccaccaacgtggcccactggaccacccctagccttaagtgcatcagggacccagcgctcgtacaccagagacccgcgcctccctctacggtaaccacggcaggcgtaaccccccagcccgagagcctgtccccgagcggcaaggagcctgcagcgagcagcccctcaagcaacaacacagccgctaccaccgcggcaatcgtgcccggcagccagctgatgccctcaaagagccccagcaccggcaccactgagataagcagccacgagagctcacacggcactccctcacagaccactgccaagaattgggagctgaccgcctctgccagccaccagcccccaggcgtgtatccccagggccacagcgacaccacggtcgccatcagcacatctacagtgcttttgtgcggccttagcgccgtgtcactgctggcatgctacttgaaaagtaggcaaactccccctcttgccagtgtggaaatggaggccatggaagccctgcccgtgacctggggcaccagttctagggacgaggaccttgagaactgctcacatcatttgtga

SEQ ID NO: 1721 - DNA, 2724 bp, synthetic construct
  misc_feature 1..2724: note = Description of Artificial Sequence: Synthetic polynucleotide
  source 1..2724: mol_type = other DNA
atggcactgcctgtgaccgccctgctgctgccactggccctgctgctgcacgcagccaggcccgacatccagatgacacagaccacaagctccctgtccgcctctctgggcgacagagtgaccatcagctgccgggcctcccaggatatctctaagtatctgaactggtaccagcagaagcccgatggcacagtgaagctgctgatctatcacaccagccgcctgcactccggagtgccttctaggttcagcggctccggctctggcacagactacagcctgaccatctccaacctggagcaggaggatatcgccacctatttctgccagcagggcaatacactgccttacacctttggcggcggcacaaagctggagatcaccggaggaggaggcagcggaggaggaggctccggcggcggcggctctgaggtgaagctgcaggagtccggaccaggcctggtggcacctagccagtccctgtctgtgacatgtaccgtgtccggcgtgtctctgccagactacggcgtgtcttggatcaggcagccacctaggaagggcctggagtggctgggcgtgatctggggcagcgagacaacatactataattctgccctgaagagcagactgacaatcatcaaggacaacagcaagtcccaggtgttcctgaagatgaatagcctgcagacagacgataccgccatctactattgcgccaagcactactattacggcggcagctatgccatggattactggggccagggcacatccgtgaccgtgtctagcaccacaaccccagcacctcgcccaccaacaccagcaccaaccatcgcatcccagccactgtctctgaggcccgaggcatgtaggcctgcagcaggaggcgccgtgcacaccaggggcctggactttgcctgcgatatctatatctgggcaccactggcaggaacatgtggcgtgctgctgctgtccctggtcatcaccctgtattgcaagagaggccggaagaagctgctgtacatcttcaagcagcccttcatgaggcccgtgcagacaacccaggaggaggacggctgcagctgtcggttcccagaggaggaggagggaggatgtgagctgagggtgaagttttctaggagcgccgatgcaccagcatataagcagggacagaaccagctgtacaacgagctgaatctgggcaggagagaggagtacgacgtgctggataagaggaggggaagggaccccgagatgggaggcaagccaaggagaaagaacccccaggagggcctgtataatgagctgcagaaggacaagatggccgaggcctactccgagatcggcatgaagggagagcggcgcaggggcaagggacacgatggcctgtatcagggcctgtctacagccaccaaggacacctacgatgcactgcacatgcaggccctgcctccaaggggttcaggagctactaacttcagcctgctgaagcaggctggagacgtggaggagaaccctggacctatgcttctcctggtgacaagccttctgctctgtgagttaccacacccagcattcctcctgatcccaaactgggtgaacgtgatctccgacctgaaaaagatcgaggatttgatccagagcatgcacattgacgccaccctgtataccgagtccgacgtgcacccgagttgcaaggtgactgccatgaagtgcttcctgctggagctgcaagtgatcagcctggagagcggcgacgccagcatccacgacaccgtggaaaaccttatcattctggccaacaatagcctgagcagcaacggcaacgtgaccgaaagcggatgtaaggaatgcgaggaactggaagagaagaatatcaaagaattcctgcaaagcttcgtgcacatcgtgcagatgttcatcaacacttcttcaggtggcggtagtggtgggggaggatctggaggcggaggaagcgggggtggaggttcaggaggagggagcttgcaaattacctgcccccctccgatgagcgtggagcacgccgacatctgggtcaagagctacagcttgtatagtagggagcggtacatctgtaacagcgggttcaagaggaaggccgggaccagctcactgaccgagtgcgtgttgaacaaggccaccaacgtggcccactggaccacccctagccttaagtgcatcagggacccagcgctcgtacaccagagacccgcgcctccctctacggtaaccacggcaggcgtaaccccccagcccgagagcctgtccccgagcggcaaggagcctgcagcgagcagcccctcaagcaacaacacagccgctaccaccgcggcaatcgtgcccggcagccagctgatgccctcaaagagccccagcaccggcaccactgagataagcagccacgagagctcacacggcactccctcacagaccactgccaagaattgggagctgaccgcctctgccagccaccagcccccaggcgtgtatccccagggccacagcgacaccacggtcgccatcagcacatctacagtgcttttgtgcggccttagcgccgtgtcactgctggcatgctacttgaaaagtaggcaaactccccctcttgccagtgtggaaatggaggccatggaagccctgcccgtgacctggggcaccagttctagggacgaggaccttgagaactgctcacatcatttgtga

SEQ ID NO: 1722 - DNA, 2712 bp, synthetic construct
  misc_feature 1..2712: note = Description of Artificial Sequence: Synthetic polynucleotide
  source 1..2712: mol_type = other DNA
atggcactgcctgtgaccgccctgctgctgccactggccctgctgctgcacgcagccaggcccgacatccagatgacacagaccacaagctccctgtccgcctctctgggcgacagagtgaccatcagctgccgggcctcccaggatatctctaagtatctgaactggtaccagcagaagcccgatggcacagtgaagctgctgatctatcacaccagccgcctgcactccggagtgccttctaggttcagcggctccggctctggcacagactacagcctgaccatctccaacctggagcaggaggatatcgccacctatttctgccagcagggcaatacactgccttacacctttggcggcggcacaaagctggagatcaccggaggaggaggcagcggaggaggaggctccggcggcggcggctctgaggtgaagctgcaggagtccggaccaggcctggtggcacctagccagtccctgtctgtgacatgtaccgtgtccggcgtgtctctgccagactacggcgtgtcttggatcaggcagccacctaggaagggcctggagtggctgggcgtgatctggggcagcgagacaacatactataattctgccctgaagagcagactgacaatcatcaaggacaacagcaagtcccaggtgttcctgaagatgaatagcctgcagacagacgataccgccatctactattgcgccaagcactactattacggcggcagctatgccatggattactggggccagggcacatccgtgaccgtgtctagcaccacaaccccagcacctcgcccaccaacaccagcaccaaccatcgcatcccagccactgtctctgaggcccgaggcatgtaggcctgcagcaggaggcgccgtgcacaccaggggcctggactttgcctgcgatatctatatctgggcaccactggcaggaacatgtggcgtgctgctgctgtccctggtcatcaccctgtattgcaagagaggccggaagaagctgctgtacatcttcaagcagcccttcatgaggcccgtgcagacaacccaggaggaggacggctgcagctgtcggttcccagaggaggaggagggaggatgtgagctgagggtgaagttttctaggagcgccgatgcaccagcatataagcagggacagaaccagctgtacaacgagctgaatctgggcaggagagaggagtacgacgtgctggataagaggaggggaagggaccccgagatgggaggcaagccaaggagaaagaacccccaggagggcctgtataatgagctgcagaaggacaagatggccgaggcctactccgagatcggcatgaagggagagcggcgcaggggcaagggacacgatggcctgtatcagggcctgtctacagccaccaaggacacctacgatgcactgcacatgcaggccctgcctccaaggggatccggagctactaacttcagcctgctgaagcaggctggagacgtggaggagaaccctggacctatggactggacctggattctgtttctggtggccgctgccacaagagtgcacagcaattgggtcaacgtgatcagcgacctgaagaagatcgaggacctgatccagagcatgcacatcgacgccacactgtacaccgagtccgatgtgcaccctagctgcaaagtgaccgccatgaagtgctttctgctggaactgcaagtgatcagcctggaaagcggcgacgccagcatccacgataccgtggaaaatctgatcatcctggccaacaacagcctgagcagcaacggcaatgtgaccgagagcggctgcaaagagtgcgaggaactggaagagaagaacatcaaagagttcctccagagcttcgtccacatcgtgcagatgttcatcaacaccagctctggcggaggaagcggaggcggaggatctggtggtggtggatctggcggcggtggtagtggcggaggttctctgcaaatcacctgtcctccacctatgagcgtggaacacgccgacatctgggtcaagagctacagcctgtacagcagagagcggtacatctgcaacagcggcttcaagagaaaggccggcacaagcagcctgaccgagtgtgtgctgaacaaggccacaaacgtggcccactggaccacacctagcctgaagtgcatcagagatcccgctctggttcaccagaggcctgctcctccatctacagtgacaacagctggcgtgacccctcagcctgagtctctgtctccatctggaaaagagcctgccgccagctctcccagctctaacaatactgctgccaccacagccgccatcgtgcctggatctcagctgatgcctagcaagagccctagcaccggcacaacagagatcagctctcacgagtctagccacggcaccccatctcagaccacagccaagaattgggagctgaccgcctctgcctctcatcagccacctggtgtttaccctcaaggccactctgataccaccgtggccatcagcacaagcacagtgctgctgtgtggactgtctgccgtgtctctgctggcctgctacctgaagtctagacagacacctcctctggccagcgtggaaatggaagccatggaagctctgcctgtgacatggggcaccagcagcagagatgaggacctcgagaattgcagccaccacctgtag

SEQ ID NO: 1723 - protein, 21 aa, synthetic construct
  REGION 1..21: note = Description of Artificial Sequence: Synthetic Signal Sequence
LLLVTSLLLCELPHPAFLLIP

SEQ ID NO: 1724 - DNA, 90 bp, synthetic construct
  misc_feature 1..90: note = Description of Artificial Sequence: Synthetic Leader sequence
  source 1..90: mol_type = other DNA
atggccccgcggcgggcgcgcggctgccggaccctcggtctcccggcgctgctactgctgctgctgctccggccgccggcgacgcggggc

SEQ ID NO: 1725 - protein, 4 aa, synthetic construct
  REGION 1..4: note = Description of Artificial Sequence: Synthetic Linker
ASFE

SEQ ID NO: 1726 - DNA, 12 bp, synthetic construct
  misc_feature 1..12: note = Description of Artificial Sequence: Synthetic Linker
  source 1..12: mol_type = other DNA
gctagcttcgaa

SEQ ID NO: 1727-1729 - skipped (3 entries)

SEQ ID NO: 1730 - protein, 42 aa, Homo sapiens; identical to SEQ ID NO: 426

SEQ ID NO: 1731 - DNA, 126 bp, Homo sapiens
  source 1..126: mol_type = other DNA
aagcgcggccggaagaagctgctgtatatcttcaagcagcccttcatgcggcccgtgcagacaacccaggaggaggacggctgcagctgtaggttccctgaggaggaggagggcggctgtgagctg

SEQ ID NO: 1732 - protein, 243 aa, synthetic construct
  REGION 1..243: note = Description of Artificial Sequence: Synthetic Construct
DIQMTQSPSSLSASVGDRVTITCRASQDVNTAVAWYQQKPGKAPKLLIYSASFLYSGVPSRFSGSRSGTDFTLTISSLQPEDFATYYCQQHYTTPPTFGQGTKVEIKGSTSGSGKPGSGEGSGEVQLVESGGGLVQPGGSLRLSCAASGFNIKDTYIHWVRQAPGKGLEWVARIYPTNGYTRYADSVKGRFTISADTSKNTAYLQMNSLRAEDTAVYYCSRWGGDGFYAMDVWGQGTLVTVSS

SEQ ID NO: 1733 - DNA, 729 bp, synthetic construct
  misc_feature 1..729: note = Description of Artificial Sequence: Synthetic Construct
  source 1..729: mol_type = other DNA
gatatccagatgacccagtccccgagctccctgtccgcctctgtgggcgatagggtcaccatcacctgccgtgccagtcaggatgtgaatactgctgtagcctggtatcaacagaaaccaggaaaagctccgaaactactgatttactcggcatccttcctttattctggagtcccttctcgcttctctggatctagatctgggacggatttcactctgaccatcagcagtctgcagccggaagacttcgcaacttattactgtcagcaacattatactactcctcccacgttcggacagggtaccaaggtggagatcaaagggtctacatctggatctgggaagccgggttctggtgagggttctggtgaggttcagctggtggagtctggcggtggcctggtgcagccagggggctcactccgtttgtcctgtgcagcttctggcttcaacattaaagacacctatatacactgggtgcgtcaggccccgggtaagggcctggaatgggttgcaaggatttatcctacgaatggttatactagatatgccgatagcgtcaagggccgtttcactataagcgcagacacatccaaaaacacagcctacctgcagatgaacagcctgcgtgctgaggacactgccgtctattattgttctagatggggaggggacggcttctatgctatggacgtgtggggtcaaggaaccctggtcaccgtctcctcg

SEQ ID NO: 1734 - protein, 45 aa, synthetic construct; identical to SEQ ID NO: 601
  REGION 1..45: note = Description of Artificial Sequence: Synthetic Construct

SEQ ID NO: 1735 - DNA, 135 bp, synthetic construct
  misc_feature 1..135: note = Description of Artificial Sequence: Synthetic Construct
  source 1..135: mol_type = other DNA
accacgacgccagcgccgcgaccaccaacaccggcgcccaccatcgcgtcgcagcccctgtccctgcgcccagaggcgtgccggccagcggcggggggcgcagtgcacacgagggggctggacttcgcctgtgat

SEQ ID NO: 1736 - protein, 24 aa, synthetic construct
  REGION 1..24: note = Description of Artificial Sequence: Synthetic Construct
IYIWAPLAGTCGVLLLSLVITLYC

SEQ ID NO: 1737 - DNA, 72 bp, synthetic construct
  misc_feature 1..72: note = Description of Artificial Sequence: Synthetic Construct
  source 1..72: mol_type = other DNA
atctacatctgggcgcccttggccgggacttgtggggtccttctcctgtcactggttatcaccctttactgc

SEQ ID NO: 1738 - protein, 112 aa, Homo sapiens; identical to SEQ ID NO: 419

SEQ ID NO: 1739 - DNA, 336 bp, Homo sapiens
  source 1..336: mol_type = other DNA
agagtgaagttttccaggtctgccgatgccccagcctacaagcagggccagaatcagctgtataacgagctgaatctgggccggagagaggagtacgacgtgctggataagaggaggggacgggaccccgagatgggaggcaagccacggagaaagaacccccaggagggcctgtacaatgagctgcagaaggacaagatggccgaggcctattctgagatcggcatgaagggagagaggcgccggggcaagggacacgatggcctgtaccagggcctgagcacagccaccaaggacacctatgatgcactgcacatgcaggccctgcctccaagg

SEQ ID NO: 1740 - protein, 186 aa, synthetic construct; identical to SEQ ID NO: 13
  REGION 1..186: note = Description of Artificial Sequence: Synthetic Destabilizing Domain (DD)

SEQ ID NO: 1741 - DNA, 558 bp, synthetic construct; identical to SEQ ID NO: 1685
  misc_feature 1..558: note = Description of Artificial Sequence: Synthetic Destabilizing Domain (DD)
  source 1..558: mol_type = other DNA

SEQ ID NO: 1742 - DNA, 558 bp, synthetic construct; identical to SEQ ID NO: 1686
  misc_feature 1..558: note = Description of Artificial Sequence: Synthetic Destabilizing Domain (DD)
  source 1..558: mol_type = other DNA

SEQ ID NO: 1743 - DNA, 558 bp, synthetic construct; identical to SEQ ID NO: 1692
  misc_feature 1..558: note = Description of Artificial Sequence: Synthetic Destabilizing Domain (DD)
  source 1..558: mol_type = other DNA

SEQ ID NO: 1744 - DNA, 2061 bp, synthetic construct
  misc_feature 1..2061: note = Description of Artificial Sequence: Synthetic Construct
  source 1..2061: mol_type = other DNA
atgctgctgctcgtgacatctctgctgctgtgcgagctgccccaccccgcctttctgctgatccccgatatccagatgacccagtccccgagctccctgtccgcctctgtgggcgatagggtcaccatcacctgccgtgccagtcaggatgtgaatactgctgtagcctggtatcaacagaaaccaggaaaagctccgaaactactgatttactcggcatccttcctttattctggagtcccttctcgcttctctggatctagatctgggacggatttcactctgaccatcagcagtctgcagccggaagacttcgcaacttattactgtcagcaacattatactactcctcccacgttcggacagggtaccaaggtggagatcaaagggtctacatctggatctgggaagccgggttctggtgagggttctggtgaggttcagctggtggagtctggcggtggcctggtgcagccagggggctcactccgtttgtcctgtgcagcttctggcttcaacattaaagacacctatatacactgggtgcgtcaggccccgggtaagggcctggaatgggttgcaaggatttatcctacgaatggttatactagatatgccgatagcgtcaagggccgtttcactataagcgcagacacatccaaaaacacagcctacctgcagatgaacagcctgcgtgctgaggacactgccgtctattattgttctagatggggaggggacggcttctatgctatggacgtgtggggtcaaggaaccctggtcaccgtctcctcggctagcttcgaaaccacgacgccagcgccgcgaccaccaacaccggcgcccaccatcgcgtcgcagcccctgtccctgcgcccagaggcgtgccggccagcggcggggggcgcagtgcacacgagggggctggacttcgcctgtgatggatctatctacatctgggcgcccttggccgggacttgtggggtccttctcctgtcactggttatcaccctttactgcactagtaaacggggcagaaagaaactcctgtatatattcaaacaaccatttatgagaccagtacaaactactcaagaggaagatggctgtagctgccgatttccagaagaagaagaaggaggatgtgaactgcatatgagagtgaagttcagcaggagcgcagacgcccccgcgtacaagcagggccagaaccagctctataacgagctcaatctaggacgaagagaggagtacgatgttttggacaagagacgtggccgggaccctgagatggggggaaagccgagaaggaagaaccctcaggaaggcctgtacaatgaactgcagaaagataagatggcggaggcctacagtgagattgggatgaaaggcgagcgccggaggggcaaggggcacgatggcctttaccagggtctcagtacagccaccaaggacacctacgacgcccttcacatgcaggccctgccccctcgcggatccgttggttcgctaaactgcatcgtcgctgtgtcccagaacatgggcatcggcaagaacggggacctgccctggccaccgctcaggaatgaattcagatatttccagagaatgaccacaacctcttcagtagaaggtaaacagaatctggtgattatgggtaagaagacctggttctccattcctgagaagaatcgacctttaaagggtagaattaatttagttctcagcagagaactcaaggaacctccacaaggagctcattttctttccagaagtctagatgatgccttaaaacttactgaacaaccagaattagcaaataaagtagacatggtctggatagttggtggcagttctgttattaaggaagccatgaatcacccaggccatcttaaactatttgtgacaaggatcatgcaagactttgaaagtgacacgttttttccagaaattgatttggagaaatataaacttctgccagaatacccaggtgttctctctgatgtccaggaggagaaaggcattaagtacaaatttgaagtatatgagaagaatgattga

SEQ ID NO: 1745 - protein, 246 aa, synthetic construct
  REGION 1..246: note = Description of Artificial Sequence: Synthetic scFV sequence
DIVLTQSPASLAMSLGKRATISCRASESVSVIGAHLIHWYQQKPGQPPKLLIYLASNLETGVPARFSGSGSGTDFTLTIDPVEEDDVAIYSCLQSRIFPRTFGGGTKLEIKGSTSGSGKPGSGEGSTKGQIQLVQSGPELKKPGETVKISCKASGYTFTDYSINWVKRAPGKGLKWMGWINTETREPAYAYDFRGRFAFSLETSASTAYLQINNLKYEDTATYFCALDYSYAMDYWGQGTSVTVSS

SEQ ID NO: 1746 - DNA, 738 bp, synthetic construct
  misc_feature 1..738: note = Description of Artificial Sequence: Synthetic scFV sequence
  source 1..738: mol_type = other DNA
gacatcgtgctgacacagagccctgcatccctggcaatgtccctgggcaagagggcaaccatctcttgcagggcctctgagagcgtgtccgtgatcggcgcccacctgatccactggtaccagcagaagccaggacagccacctaagctgctgatctatctggcctccaacctggagacaggagtgcctgcacggttctctggcagcggctccggcaccgactttacactgaccatcgatccagtggaggaggacgatgtggccatctactcttgcctgcagagcagaatcttccccaggacatttggcggcggcaccaagctggagatcaagggctctacaagcggctccggcaagcctggctccggagagggctctaccaagggacagatccagctggtgcagtccggacccgagctgaagaagcctggcgagacagtgaagatcagctgtaaggcctccggctacacattcaccgattattctatcaactgggtgaagagggcaccaggcaagggcctgaagtggatgggctggatcaatacagagacacgggagcccgcctacgcctatgacttcagaggcaggttcgcctttagcctggagacatctgccagcaccgcctacctgcagatcaacaatctgaagtacgaggatacagccacctatttttgcgccctggactacagctatgccatggattattggggccagggcacatccgtgaccgtgagctcc

SEQ ID NO: 1747 - protein, 69 aa, Homo sapiens; identical to SEQ ID NO: 607

SEQ ID NO: 1748 - DNA, 207 bp, Homo sapiens
  source 1..207: mol_type = other DNA
accacaaccccagcacctagaccaccaacaccagcacccaccatcgcctctcagccactgagcctgcgccccgaggcatgtaggcctgcagcaggcggcgccgtgcacaccaggggcctggactttgcctgcgatatctacatctgggcaccactggcaggaacatgtggcgtgctgctgctgtccctggtcatcaccctgtactgc

SEQ ID NO: 1749 - DNA, 63 bp, Homo sapiens; identical to SEQ ID NO: 1321
  source 1..63: mol_type = other DNA

SEQ ID NO: 1750 - DNA, 63 bp, synthetic construct; identical to SEQ ID NO: 1322
  misc_feature 1..63: note = Description of Artificial Sequence: Synthetic Signal Sequence
  source 1..63: mol_type = other DNA

SEQ ID NO: 1751 - DNA, 63 bp, synthetic construct; identical to SEQ ID NO: 1323
  misc_feature 1..63: note = Description of Artificial Sequence: Synthetic Signal Sequence
  source 1..63: mol_type = other DNA

SEQ ID NO: 1752 - DNA, 63 bp, synthetic construct; identical to SEQ ID NO: 1324
  misc_feature 1..63: note = Description of Artificial Sequence: Synthetic Signal Sequence
  source 1..63: mol_type = other DNA

SEQ ID NO: 1753 - DNA, 63 bp, synthetic construct; identical to SEQ ID NO: 1325
  misc_feature 1..63: note = Description of Artificial Sequence: Synthetic Signal Sequence
  source 1..63: mol_type = other DNA

SEQ ID NO: 1754 - DNA, 63 bp, synthetic construct
  misc_feature 1..63: note = Description of Artificial Sequence: Synthetic Leader sequence
  source 1..63: mol_type = other DNA
atggcactgcctgtgaccgccctgctgctgccactggccctgctgctgcacgcagccagaccc

SEQ ID NO: 1755 - protein, 158 aa, synthetic construct; identical to SEQ ID NO: 1174
  REGION 1..158: note = Description of Artificial Sequence: Synthetic Destabilizing Domain (DD)

SEQ ID NO: 1756 - DNA, 474 bp, synthetic construct; identical to SEQ ID NO: 1678
  misc_feature 1..474: note = Description of Artificial Sequence: Synthetic Destabilized Domain (DD)
  source 1..474: mol_type = other DNA

SEQ ID NO: 1757 - DNA, 474 bp, synthetic construct; identical to SEQ ID NO: 1676
  misc_feature 1..474: note = Description of Artificial Sequence: Synthetic Destabilizing Domain (DD)
  source 1..474: mol_type = other DNA

SEQ ID NO: 1758 - DNA, 477 bp, synthetic construct; identical to SEQ ID NO: 1677
  misc_feature 1..477: note = Description of Artificial Sequence: Synthetic Destabilizing Domain (DD)
  source 1..477: mol_type = other DNA

SEQ ID NO: 1759 - DNA, 474 bp, synthetic construct; identical to SEQ ID NO: 1678
  misc_feature 1..474: note = Description of Artificial Sequence: Synthetic Destabilizing Domain (DD)
  source 1..474: mol_type = other DNA

SEQ ID NO: 1760 - DNA, 474 bp, synthetic construct; identical to SEQ ID NO: 1679
  misc_feature 1..474: note = Description of Artificial Sequence: Synthetic Destabilizing Domain (DD)
  source 1..474: mol_type = other DNA

SEQ ID NO: 1761 - DNA, 474 bp, synthetic construct; identical to SEQ ID NO: 1680
  misc_feature 1..474: note = Description of Artificial Sequence: Synthetic Destabilizing Domain (DD)
  source 1..474: mol_type = other DNA

SEQ ID NO: 1762 - DNA, 474 bp, synthetic construct; identical to SEQ ID NO: 1681
  misc_feature 1..474: note = Description of Artificial Sequence: Synthetic Destabilizing Domain (DD)
  source 1..474: mol_type = other DNA

SEQ ID NO: 1763 - protein, 107 aa, synthetic construct; identical to SEQ ID NO: 1177
  REGION 1..107: note = Description of Artificial Sequence: Synthetic Destabilizing Domain (DD)

SEQ ID NO: 1764 - DNA, 321 bp, synthetic construct
  misc_feature 1..321: note = Description of Artificial Sequence: Synthetic Destabilizing Domain (DD)
  source 1..321: mol_type = other DNA
ggcgtgcaggttgagactataagcccaggcgacggcaggaccttccccaagaggggccagacatgcgtggtgcactacaccggcatgcttggcgacggcaaaaaggtggactcaagcagggacaggaacaagcccttcaagttcatgttgggcaaacaggaggtgatcagaggctgggaggagggtgttgcccagatgagcgtggggcagggcgccaagctcacgataagtcccgattacgcctacggcgccaccggtcaccccggcatcatccccccacacgccaccctggtgttcgacgtggaattgctggagctggag

SEQ ID NO: 1765 - DNA, 324 bp, synthetic construct; identical to SEQ ID NO: 1669
  misc_feature 1..324: note = Description of Artificial Sequence: Synthetic Destabilizing Domain (DD)
  source 1..324: mol_type = other DNA

SEQ ID NO: 1766 - DNA, 324 bp, synthetic construct; identical to SEQ ID NO: 1670
  misc_feature 1..324: note = Description of Artificial Sequence: Synthetic Destabilizing Domain (DD)
  source 1..324: mol_type = other DNA

SEQ ID NO: 1767 - DNA, 324 bp, synthetic construct; identical to SEQ ID NO: 1671
  misc_feature 1..324: note = Description of Artificial Sequence: Synthetic Destabilizing Domain (DD)
  source 1..324: mol_type = other DNA

SEQ ID NO: 1768 - DNA, 324 bp, synthetic construct; identical to SEQ ID NO: 1672
  misc_feature 1..324: note = Description of Artificial Sequence: Synthetic Destabilizing Domain (DD)
  source 1..324: mol_type = other DNA

SEQ ID NO: 1769 - DNA, 321 bp, synthetic construct; identical to SEQ ID NO: 1673
  misc_feature 1..321: note = Description of Artificial Sequence: Synthetic Destabilizing Domain (DD)
  source 1..321: mol_type = other DNA

SEQ ID NO: 1770 - DNA, 321 bp, synthetic construct; identical to SEQ ID NO: 1674
  misc_feature 1..321: note = Description of Artificial Sequence: Synthetic Destabilizing Domain (DD)
  source 1..321: mol_type = other DNA

SEQ ID NO: 1771 - DNA, 321 bp, synthetic construct; identical to SEQ ID NO: 1675
  misc_feature 1..321: note = Description of Artificial Sequence: Synthetic Destabilizing Domain (DD)
  source 1..321: mol_type = other DNA

SEQ ID NO: 1772 - DNA, 1473 bp, synthetic construct
  misc_feature 1..1473: note = Description of Artificial Sequence: Synthetic Construct
  source 1..1473: mol_type = other DNA
atggcactgcctgtgaccgccctgctgctgccactggccctgctgctgcacgcagccagacccgacatcgtgctgacacagagccctgcatccctggcaatgtccctgggcaagagggcaaccatctcttgcagggcctctgagagcgtgtccgtgatcggcgcccacctgatccactggtaccagcagaagccaggacagccacctaagctgctgatctatctggcctccaacctggagacaggagtgcctgcacggttctctggcagcggctccggcaccgactttacactgaccatcgatccagtggaggaggacgatgtggccatctactcttgcctgcagagcagaatcttccccaggacatttggcggcggcaccaagctggagatcaagggctctacaagcggctccggcaagcctggctccggagagggctctaccaagggacagatccagctggtgcagtccggacccgagctgaagaagcctggcgagacagtgaagatcagctgtaaggcctccggctacacattcaccgattattctatcaactgggtgaagagggcaccaggcaagggcctgaagtggatgggctggatcaatacagagacacgggagcccgcctacgcctatgacttcagaggcaggttcgcctttagcctggagacatctgccagcaccgcctacctgcagatcaacaatctgaagtacgaggatacagccacctatttttgcgccctggactacagctatgccatggattattggggccagggcacatccgtgaccgtgagctccaccacaaccccagcacctagaccaccaacaccagcacccaccatcgcctctcagccactgagcctgcgccccgaggcatgtaggcctgcagcaggcggcgccgtgcacaccaggggcctggactttgcctgcgatatctacatctgggcaccactggcaggaacatgtggcgtgctgctgctgtccctggtcatcaccctgtactgcaagcgcggccggaagaagctgctgtatatcttcaagcagcccttcatgcggcccgtgcagacaacccaggaggaggacggctgcagctgtaggttccctgaggaggaggagggcggctgtgagctgagagtgaagttttccaggtctgccgatgccccagcctacaagcagggccagaatcagctgtataacgagctgaatctgggccggagagaggagtacgacgtgctggataagaggaggggacgggaccccgagatgggaggcaagccacggagaaagaacccccaggagggcctgtacaatgagctgcagaaggacaagatggccgaggcctattctgagatcggcatgaagggagagaggcgccggggcaagggacacgatggcctgtaccagggcctgagcacagccaccaaggacacctatgatgcactgcacatgcaggccctgcctccaaggtga

SEQ ID NO: 1773 - DNA, 1800 bp, synthetic construct
  misc_feature 1..1800: note = Description of Artificial Sequence: Synthetic Construct
  source 1..1800: mol_type = other DNA
atggcactgcctgtgaccgccctgctgctgccactggccctgctgctgcacgcagccagacccgacatcgtgctgacacagagccctgcatccctggcaatgtccctgggcaagagggcaaccatctcttgcagggcctctgagagcgtgtccgtgatcggcgcccacctgatccactggtaccagcagaagccaggacagccacctaagctgctgatctatctggcctccaacctggagacaggagtgcctgcacggttctctggcagcggctccggcaccgactttacactgaccatcgatccagtggaggaggacgatgtggccatctactcttgcctgcagagcagaatcttccccaggacatttggcggcggcaccaagctggagatcaagggctctacaagcggctccggcaagcctggctccggagagggctctaccaagggacagatccagctggtgcagtccggacccgagctgaagaagcctggcgagacagtgaagatcagctgtaaggcctccggctacacattcaccgattattctatcaactgggtgaagagggcaccaggcaagggcctgaagtggatgggctggatcaatacagagacacgggagcccgcctacgcctatgacttcagaggcaggttcgcctttagcctggagacatctgccagcaccgcctacctgcagatcaacaatctgaagtacgaggatacagccacctatttttgcgccctggactacagctatgccatggattattggggccagggcacatccgtgaccgtgagctccaccacaaccccagcacctagaccaccaacaccagcacccaccatcgcctctcagccactgagcctgcgccccgaggcatgtaggcctgcagcaggcggcgccgtgcacaccaggggcctggactttgcctgcgatatctacatctgggcaccactggcaggaacatgtggcgtgctgctgctgtccctggtcatcaccctgtactgcaagcgcggccggaagaagctgctgtatatcttcaagcagcccttcatgcggcccgtgcagacaacccaggaggaggacggctgcagctgtaggttccctgaggaggaggagggcggctgtgagctgagagtgaagttttccaggtctgccgatgccccagcctacaagcagggccagaatcagctgtataacgagctgaatctgggccggagagaggagtacgacgtgctggataagaggaggggacgggaccccgagatgggaggcaagccacggagaaagaacccccaggagggcctgtacaatgagctgcagaaggacaagatggccgaggcctattctgagatcggcatgaagggagagaggcgccggggcaagggacacgatggcctgtaccagggcctgagcacagccaccaaggacacctatgatgcactgcacatgcaggccctgcctccaaggtctggcggcgtgcaggtggagacaatcagcccaggcgacggaaggacattcccaaagaggggacagacctgcgtggtgcactacacaggcatgctgggcgatggcaagaaggtggacagctcccgggatagaaacaagcccttcaagtttatgctgggcaagcaggaagtgatcaggggatgggaggagggagtggcacagatgtccgtgggacagggcgccaagctgaccatctctcctgactacgcctatggagcaacaggacacccaggaatcatcccacctcacgccaccctggtgtttgatgtggagctgctggagctggagtga

SEQ ID NO: 1774 - DNA, 1953 bp, synthetic construct
  misc_feature 1..1953: note = Description of Artificial Sequence: Synthetic Construct
  source 1..1953: mol_type = other DNA
atggcactgcctgtgaccgccctgctgctgccactggccctgctgctgcacgcagccagacccgacatcgtgctgacacagagccctgcatccctggcaatgtccctgggcaagagggcaaccatctcttgcagggcctctgagagcgtgtccgtgatcggcgcccacctgatccactggtaccagcagaagccaggacagccacctaagctgctgatctatctggcctccaacctggagacaggagtgcctgcacggttctctggcagcggctccggcaccgactttacactgaccatcgatccagtggaggaggacgatgtggccatctactcttgcctgcagagcagaatcttccccaggacatttggcggcggcaccaagctggagatcaagggctctacaagcggctccggcaagcctggctccggagagggctctaccaagggacagatccagctggtgcagtccggacccgagctgaagaagcctggcgagacagtgaagatcagctgtaaggcctccggctacacattcaccgattattctatcaactgggtgaagagggcaccaggcaagggcctgaagtggatgggctggatcaatacagagacacgggagcccgcctacgcctatgacttcagaggcaggttcgcctttagcctggagacatctgccagcaccgcctacctgcagatcaacaatctgaagtacgaggatacagccacctatttttgcgccctggactacagctatgccatggattattggggccagggcacatccgtgaccgtgagctccaccacaaccccagcacctagaccaccaacaccagcacccaccatcgcctctcagccactgagcctgcgccccgaggcatgtaggcctgcagcaggcggcgccgtgcacaccaggggcctggactttgcctgcgatatctacatctgggcaccactggcaggaacatgtggcgtgctgctgctgtccctggtcatcaccctgtactgcaagcgcggccggaagaagctgctgtatatcttcaagcagcccttcatgcggcccgtgcagacaacccaggaggaggacggctgcagctgtaggttccctgaggaggaggagggcggctgtgagctgagagtgaagttttccaggtctgccgatgccccagcctacaagcagggccagaatcagctgtataacgagctgaatctgggccggagagaggagtacgacgtgctggataagaggaggggacgggaccccgagatgggaggcaagccacggagaaagaacccccaggagggcctgtacaatgagctgcagaaggacaagatggccgaggcctattctgagatcggcatgaagggagagaggcgccggggcaagggacacgatggcctgtaccagggcctgagcacagccaccaaggacacctatgatgcactgcacatgcaggccctgcctccaaggtccggaatctctctgatcgccgccctggcagtggactacgtgatcggcatggagaacgccatgccatggaatctgcccgccgatctggcctggttcaagcggaacaccctgaataagccagtgatcatgggcagacacacatgggagtctatcggcaggcccctgcctggacgcaagaacatcatcctgagctcccagcccggcaccgacgatagggtgacatgggtgaagtccgtggacgaggcaatcgcagcatgcggcgatgtgcccgagatcatggtcatcggcggcggcagagtgatcgagcagttcctgcctaaggcccagaagctgtacctgacccacatcgacgccgaggtggagggcgacacacactttcctgattatgagccagacgattgggagagcgtgttctccgagtttcacgacgccgatgcccagaacagccacagctattgttttgagatcctggagcggagatga

SEQ ID NO: 1775 - protein, 20 aa, Homo sapiens
MYRMQLLSCIALSLALVTNS

SEQ ID NO: 1776 - DNA, 60 bp, synthetic construct
  misc_feature 1..60: note = Description of Artificial Sequence: Synthetic Signal Sequence
  source 1..60: mol_type = other DNA
atgtaccgaatgcaactgctgagctgcatcgccctgagcctggcactcgtgaccaacagc

SEQ ID NO: 1777 - DNA, 60 bp, Homo sapiens
  source 1..60: mol_type = other DNA
atgtacaggatgcaactcctgtcttgcattgcactaagtcttgcacttgtcacaaacagt

SEQ ID NO: 1778 - DNA, 60 bp, synthetic construct
  misc_feature 1..60: note = Description of Artificial Sequence: Synthetic Signal Sequence
  source 1..60: mol_type = other DNA
atgtacaggatgcagctgctgagctgcatcgccctgagcctggccctggtgaccaacagc

SEQ ID NO: 1779 - DNA, 60 bp, synthetic construct
  misc_feature 1..60: note = Description of Artificial Sequence: Synthetic Signal Sequence
  source 1..60: mol_type = other DNA
atgtacagaatgcagctgctgagctgcatcgccctgtccctcgccctggtgaccaactcc

SEQ ID NO: 1780 - protein, 6 aa, synthetic construct
  REGION 1..6: note = Description of Artificial Sequence: Synthetic Linker
EFSTEF

SEQ ID NO: 1781 - DNA, 18 bp, synthetic construct
  misc_feature 1..18: note = Description of Artificial Sequence: Synthetic Linker
  source 1..18: mol_type = other DNA
gagttcagcaccgagttt

SEQ ID NO: 1782 - skipped

SEQ ID NO: 1783 - DNA, 402 bp, synthetic construct
  misc_feature 1..402: note = Description of Artificial Sequence: Synthetic Construct
  source 1..402: mol_type = other DNA
gcgccaactagtagcagcacaaaaaagacacagcttcaactggagcacctgctgctggacctgcagatgatccttaacggaatcaacaactacaagaaccccaagctgaccaggatgctgacgtttaagttttacatgcccaagaaggccaccgaactcaaacacctgcaatgcctggaggaagagctgaaaccgcttgaggaagtgttgaacctggcccaaagcaagaatttccacctgaggcccagggacctgataagcaacatcaacgtgatcgtgctggaactgaagggtagcgagaccaccttcatgtgcgagtacgccgacgagaccgcaaccatcgtggagttcctgaaccgatggataacattctgccagagcatcattagcactctgacctga

SEQ ID NO: 1784 - DNA, 402 bp, Homo sapiens
  source 1..402: mol_type = other DNA
gcacctacttcaagttctacaaagaaaacacagctacaactggagcatttactgctggatttacagatgattttgaatggaattaataattacaagaatcccaaactcaccaggatgctcacatttaagttttacatgcccaagaaggccacagaactgaaacatcttcagtgtctagaagaagaactcaaacctctggaggaagtgctaaatttagctcaaagcaaaaactttcacttaagacccagggacttaatcagcaatatcaacgtaatagttctggaactaaagggatctgaaacaacattcatgtgtgaatatgctgatgagacagcaaccattgtagaatttctgaacagatggattaccttttgtcaaagcatcatctcaacactgacttga

SEQ ID NO: 1785 - protein, 107 aa, synthetic construct; identical to SEQ ID NO: 1176
  REGION 1..107: note = Description of Artificial Sequence: Synthetic Destabilizing Domain (DD)

SEQ ID NO: 1786 - DNA, 321 bp, synthetic construct
  misc_feature 1..321: note = Description of Artificial Sequence: Synthetic Destabilized Domain (DD)
  source 1..321: mol_type = other DNA
ggcgtgcaggttgagactataagcccaggcgacggcaggaccttccccaagaggggccagacatgcgtggtgcactacaccggcatgcttgaagacggcaaaaaggtggactcaagcagggacaggaacaagcccttcaagttcatgttgggcaaacaggaggtgatcagaggctgggaggagggtgttgcccagatgagcgtggggcagagggccaagctcacgataagtcccgattacgcctacggcgccaccggtcaccccggcatcatccccccacacgccaccctggtgttcgacgtggaattgctgaagcccgag

SEQ ID NO: 1787 - DNA, 321 bp, synthetic construct; identical to SEQ ID NO: 1664
  misc_feature 1..321: note = Description of Artificial Sequence: Synthetic Destabilizing Domain (DD)
  source 1..321: mol_type = other DNA

SEQ ID NO: 1788 - DNA, 321 bp, synthetic construct; identical to SEQ ID NO: 1665
  misc_feature 1..321: note = Description of Artificial Sequence: Synthetic Destabilizing Domain (DD)
  source 1..321: mol_type = other DNA

SEQ ID NO: 1789 - DNA, 321 bp, synthetic construct; identical to SEQ ID NO: 1666
  misc_feature 1..321: note = Description of Artificial Sequence: Synthetic Destabilizing Domain (DD)
  source 1..321: mol_type = other DNA

SEQ ID NO: 1790 - DNA, 321 bp, synthetic construct; identical to SEQ ID NO: 1667
  misc_feature 1..321: note = Description of Artificial Sequence: Synthetic Destabilizing Domain (DD)
  source 1..321: mol_type = other DNA

SEQ ID NO: 1791 - DNA, 321 bp, synthetic construct; identical to SEQ ID NO: 1668
  misc_feature 1..321: note = Description of Artificial Sequence: Synthetic Destabilizing Domain (DD)
  source 1..321: mol_type = other DNA

SEQ ID NO: 1792 - DNA, 807 bp, synthetic construct
  misc_feature 1..807: note = Description of Artificial Sequence: Synthetic Construct
  source 1..807: mol_type = other DNA
atgtaccgaatgcaactgctgagctgcatcgccctgagcctggcactcgtgaccaacagcgagttcagcaccgagtttggcgtgcaggttgagactataagcccaggcgacggcaggaccttccccaagaggggccagacatgcgtggtgcactacaccggcatgcttgaagacggcaaaaaggtggactcaagcagggacaggaacaagcccttcaagttcatgttgggcaaacaggaggtgatcagaggctgggaggagggtgttgcccagatgagcgtggggcagagggccaagctcacgataagtcccgattacgcctacggcgccaccggtcaccccggcatcatccccccacacgccaccctggtgttcgacgtggaattgctgaagcccgagatgcacgcgccaactagtagcagcacaaaaaagacacagcttcaactggagcacctgctgctggacctgcagatgatccttaacggaatcaacaactacaagaaccccaagctgaccaggatgctgacgtttaagttttacatgcccaagaaggccaccgaactcaaacacctgcaatgcctggaggaagagctgaaaccgcttgaggaagtgttgaacctggcccaaagcaagaatttccacctgaggcccagggacctgataagcaacatcaacgtgatcgtgctggaactgaagggtagcgagaccaccttcatgtgcgagtacgccgacgagaccgcaaccatcgtggagttcctgaaccgatggataacattctgccagagcatcattagcactctgacctga

SEQ ID NO: 1793 - DNA, 462 bp, synthetic construct
  misc_feature 1..462: note = Description of Artificial Sequence: Synthetic Construct
  source 1..462: mol_type = other DNA
atgtaccgaatgcaactgctgagctgcatcgccctgagcctggcactcgtgaccaacagcgcgccaactagtagcagcacaaaaaagacacagcttcaactggagcacctgctgctggacctgcagatgatccttaacggaatcaacaactacaagaaccccaagctgaccaggatgctgacgtttaagttttacatgcccaagaaggccaccgaactcaaacacctgcaatgcctggaggaagagctgaaaccgcttgaggaagtgttgaacctggcccaaagcaagaatttccacctgaggcccagggacctgataagcaacatcaacgtgatcgtgctggaactgaagggtagcgagaccaccttcatgtgcgagtacgccgacgagaccgcaaccatcgtggagttcctgaaccgatggataacattctgccagagcatcattagcactctgacctga

SEQ ID NO: 1794 - DNA, 960 bp, synthetic construct
  misc_feature 1..960: note = Description of Artificial Sequence: Synthetic Construct
  source 1..960: mol_type = other DNA
atgtaccgaatgcaactgctgagctgcatcgccctgagcctggcactcgtgaccaacagcgagttcagcaccgagtttatctctctgattgcggcgctggcagttgactacgttattggcatggaaaacgcgatgccatggaacctcccggctgacctggcgtggttcaaacgtaacaccctgaacaaacctgtgatcatgggtcgtcacacctgggaatctattggccgtcctctcccgggtcgtaaaaacatcattctgtcttctcagccaggcaccgacgaccgtgttacctgggttaaaagcgttgacgaagcgattgctgcgtgcggtgatgttcctgaaattatggtgatcggcggtggccgtgttatcgaacagttcctgccgaaagcgcagaaactgtacctgacccacatcgacgcggaagttgaaggtgacacccacttcccggactacgaaccggatgattgggagagcgtattctccgaattccatgatgcggatgcgcaaaactctcattcttactgttttgaaatcctggaacgtcgtatgcacgcgccaactagtagcagcacaaaaaagacacagcttcaactggagcacctgctgctggacctgcagatgatccttaacggaatcaacaactacaagaaccccaagctgaccaggatgctgacgtttaagttttacatgcccaagaaggccaccgaactcaaacacctgcaatgcctggaggaagagctgaaaccgcttgaggaagtgttgaacctggcccaaagcaagaatttccacctgaggcccagggacctgataagcaacatcaacgtgatcgtgctggaactgaagggtagcgagaccaccttcatgtgcgagtacgccgacgagaccgcaaccatcgtggagttcctgaaccgatggataacattctgccagagcatcattagcactctgacctga

SEQ ID NO: 1795 - DNA, 603 bp, synthetic construct
  misc_feature 1..603: note = Description of Artificial Sequence: Synthetic promoter
  source 1..603: mol_type = other DNA
aagcttgggagttccgcgttacataacttacggtaaatggcccgcctggctgaccgcccaacgacccccgcccattgacgtcaataatgacgtatgttcccatagtaacgccaatagggactttccattgacgtcaatgggtggagtatttacggtaaactgcccacttggcagtacatcaagtgtatcatatgccaagtacgccccctattgacgtcaatgacggtaaatggcccgcctggcattatgcccagtacatgaccttatgggactttcctacttggcagtacatctacgtattagtcatcgctattaccatggtgatgcggttttggcagtacatcaatgggcgtggatagcggtttgactcacggggatttccaagtctccaccccattgacgtcaatgggagtttgttttggcaccaaaatcaacgggactttccaaaatgtcgtaacaactccgccccattgacgcaaatgggcggtaggcgtgtacggtgggaggtctatataagcagagctcgtttagtgaaccgtcagatcgcctggagacgccatccacgctgttttgacctccatagaagacaccgactctactaga

SEQ ID NO: 1796 - DNA, 1339 bp, synthetic construct
  misc_feature 1..1339: note = Description of Artificial Sequence: Synthetic promoter
  source 1..1339: mol_type = other DNA
cgatagtaattcatacaaaaggactcgcccctgccttggggaatcccagggaccgtcgttaaactcccactaacgtagaacccagagatcgctgcgttcccgccccctcacccgcccgctctcgtcatcactgaggtggagaagagcatgcgtgaggctccggtgcccgtcagtgggcagagcgcacatcgcccacagtccccgagaagttggggggaggggtcggcaattgaaccggtgcctagagaaggtggcgcggggtaaactgggaaagtgatgtcgtgtactggctccgcctttttcccgagggtgggggagaaccgtatataagtgcagtagtcgccgtgaacgttctttttcgcaacgggtttgccgccagaacacaggtaagtgccgtgtgtggttcccgcgggcctggcctctttacgggttatggcccttgcgtgccttgaattacttccacgcccctggctgcagtacgtgattcttgatcccgagcttcgggttggaagtgggtgggagagttcgaggccttgcgcttaaggagccccttcgcctcgtgcttgagttgaggcctggcttgggcgctggggccgccgcgtgcgaatctggtggcaccttcgcgcctgtctcgctgctttcgataagtctctagccatttaaaatttttgatgacctgctgcgacgctttttttctggcaagatagtcttgtaaatgcgggccaagatctgcacactggtatttcggtttttggggccgcgggcggcgacggggcccgtgcgtcccagcgcacatgttcggcgaggcggggcctgcgagcgcggccaccgagaatcggacgggggtagtctcaagctggccggcctgctctggtgcctggcctcgcgccgccgtgtatcgccccgccctgggcggcaaggctggcccggtcggcaccagttgcgtgagcggaaagatggccgcttcccggccctgctgcagggagctcaaaatggaggacgcggcgctcgggagagcgggcgggtgagtcacccacacaaaggaaaagggcctttccgtcctcagccgtcgcttcatgtgactccacggagtaccgggcgccgtccaggcacctcgattagttctcgagcttttggagtacgtcgtctttaggttggggggaggggttttatgcgatggagtttccccacactgagtgggtggagactgaagttaggccagcttggcacttgatgtaattctccttggaatttgccctttttgagtttggatcttggttcattctcaagcctcagacagtggttcaaagtttttttcttccatttcaggtgtcgtgag

SEQ ID NO: 1797 - DNA, 399 bp, synthetic construct
  misc_feature 1..399: note = Description of Artificial Sequence: Synthetic promoter
  source 1..399: mol_type = other DNA
ccggtaggcgccaaccggctccgttctttggtggccccttcgcgccaccttctactcctcccctagtcaggaagttcccccccgccccgcagctcgcgtcgtgcaggacgtgacaaatggaagtagcacgtctcactagtctcgtgcagatggacagcaccgctgagcaatggaagcgggtaggcctttggggcagcggccaatagcagctttgctccttcgctttctgggctcagaggctgggaaggggtgggtccgggggcgggctcaggggcgggctcaggggcggggcgggcgcccgaaggtcctccggaggcccggcattctgcacgcttcaaaagcgcacgtctgccgcgctgttctcctcttcctcatctccgggcctttcgacctgcagcc

SEQ ID NO: 1798 - DNA, 1335 bp, synthetic construct
  misc_feature 1..1335: note = Description of Artificial Sequence: Synthetic promoter
  source 1..1335: mol_type = other DNA
gagtaattcatacaaaaggactcgcccctgccttggggaatcccagggaccgtcgttaaactcccactaacgtagaacccagagatcgctgcgttcccgccccctcacccgcccgctctcgtcatcactgaggtggagaagagcatgcgtgaggctccggtgcccgtcagtgggcagagcgcacatcgcccacagtccccgagaagttggggggaggggtcggcaattgaaccggtgcctagagaaggtggcgcggggtaaactgggaaagtgatgtcgtgtactggctccgcctttttcccgagggtgggggagaaccgtatataagtgcagtagtcgccgtgaacgttctttttcgcaacgggtttgccgccagaacacaggtaagtgccgtgtgtggttcccgcgggcctggcctctttacgggttatggcccttgcgtgccttgaattacttccacgcccctggctgcagtacgtgattcttgatcccgagcttcgggttggaagtgggtgggagagttcgaggccttgcgcttaaggagccccttcgcctcgtgcttgagttgaggcctggcttgggcgctggggccgccgcgtgcgaatctggtggcaccttcgcgcctgtctcgctgctttcgataagtctctagccatttaaaatttttgatgacctgctgcgacgctttttttctggcaagatagtcttgtaaatgcgggccaagatctgcacactggtatttcggtttttggggccgcgggcggcgacggggcccgtgcgtcccagcgcacatgttcggcgaggcggggcctgcgagcgcggccaccgagaatcggacgggggtagtctcaagctggccggcctgctctggtgcctggcctcgcgccgccgtgtatcgccccgccctgggcggcaaggctggcccggtcggcaccagttgcgtgagcggaaagatggccgcttcccggccctgctgcagggagctcaaaatggaggacgcggcgctcgggagagcgggcgggtgagtcacccacacaaaggaaaagggcctttccgtcctcagccgtcgcttcatgtgactccacggagtaccgggcgccgtccaggcacctcgattagttctcgagcttttggagtacgtcgtctttaggttggggggaggggttttatgcgatggagtttccccacactgagtgggtggagactgaagttaggccagcttggcacttgatgtaattctccttggaatttgccctttttgagtttggatcttggttcattctcaagcctcagacagtggttcaaagtttttttcttccatttcaggtgtcgtga

SEQ ID NO: 1799 - protein, 19 aa, synthetic construct
  REGION 1..19: note = Description of Artificial Sequence: Synthetic spacer
ATNFSLLKQAGDVEENPGP

SEQ ID NO: 1800 - DNA, 57 bp, synthetic construct
  misc_feature 1..57: note = Description of Artificial Sequence: Synthetic spacer
  source 1..57: mol_type = other DNA
gcaaccaattttagtctacttaaacaagcaggtgatgtagaagaaaatccaggtcca

SEQ ID NO: 1801 - protein, 9 aa, Homo sapiens
SARNRQKRS

SEQ ID NO: 1802 - DNA, 27 bp, Homo sapiens
  source 1..27: mol_type = other DNA
agcgccaggaatcgccagaagcggtcc

SEQ ID NO: 1803 - protein, 8 aa, Homo sapiens
ARNRQKRS

SEQ ID NO: 1804 - DNA, 24 bp, Homo sapiens
  source 1..24: mol_type = other DNA
gcccggaatagacagaagagatct

SEQ ID NO: 1805 - protein, 20 aa, synthetic construct
  REGION 1..20: note = Description of Artificial Sequence: Synthetic cleavable peptide
GATNFSLLKQAGDVEENPGP

SEQ ID NO: 1806 - DNA, 60 bp, synthetic construct
  misc_feature 1..60: note = Description of Artificial Sequence: Synthetic cleavable peptide
  source 1..60: mol_type = other DNA
ggagctactaacttcagcctgctgaagcaggctggagacgtggaggagaaccctggacct

SEQ ID NO: 1807 - protein, 306 aa, synthetic construct
  REGION 1..306: note = Description of Artificial Sequence: Synthetic payload sequence
IWELKKDVYVVELDWYPDAPGEMVVLTCDTPEEDGITWTLDQSSEVLGSGKTLTIQVKEFGDAGQYTCHKGGEVLSHSLLLLHKKEDGIWSTDILKDQKEPKNKTFLRCEAKNYSGRFTCWWLTTISTDLTFSVKSSRGSSDPQGVTCGAATLSAERVRGDNKEYEYSVECQEDSACPAAEESLPIEVMVDAVHKLKYENYTSSFFIRDIIKPDPPNNLQLKPLKNSRQVEVSWEYPDTWSTPHSYFSLTFCVQVQGKSKREKKDRVFTDKTSATVICRKNASISVRAQDRYYSSSWSEWASVPCS

SEQ ID NO: 1808 - DNA, 918 bp, synthetic construct
  misc_feature 1..918: note = Description of Artificial Sequence: Synthetic payload sequence
  source 1..918: mol_type = other DNA
atatgggaactgaagaaagatgtttatgtcgtagaattggattggtatccggatgcccctggagaaatggtggtcctcacctgtgacacccctgaagaagatggtatcacctggaccttggaccagagcagtgaggtcttaggctctggcaaaaccctgaccatccaagtcaaagagtttggagatgctggccagtacacctgtcacaaaggaggcgaggttctaagccattcgctcctgctgcttcacaaaaaggaagatggaatttggtccactgatattttaaaggaccagaaagaacccaaaaataagacctttctaagatgcgaggccaagaattattctggacgtttcacctgctggtggctgacgacaatcagtactgatttgacattcagtgtcaaaagcagcagaggctcttctgacccccaaggggtgacgtgcggagctgctacactctctgcagagagagtcagaggggacaacaaggagtatgagtactcagtggagtgccaggaggacagtgcctgcccagctgctgaggagagtctgcccattgaggtcatggtggatgccgttcacaagctcaagtatgaaaactacaccagcagcttcttcatcagggacatcatcaaacctgacccacccaacaacttgcagctgaagccattaaagaattctcggcaggtggaggtcagctgggagtaccctgacacctggagtactccacattcctacttctccctgacattctgcgttcaggtccagggcaagagcaagagagaaaagaaagatagagtcttcaccgacaagacctcagccacggtcatctgccgcaaaaatgccagcattagcgtgcgggcccaggaccgctactatagctcatcttggagcgaatgggcatctgtgccctgcagt

SEQ ID NO: 1809 - DNA, 594 bp, Homo sapiens; identical to SEQ ID NO: 1604
  source 1..594: mol_type = other DNA

SEQ ID NO: 1810 - DNA, 594 bp, synthetic construct; identical to SEQ ID NO: 1606
  misc_feature 1..594: note = Description of Artificial Sequence: Synthetic Construct
  source 1..594: mol_type = other DNA

SEQ ID NO: 1811 - DNA, 529 bp, synthetic construct
  misc_feature 1..529: note = Description of Artificial Sequence: Synthetic Construct
  source 1..529: mol_type = other DNA
gctgagggccgtgtccaatatgctgcagaaggcccgccagacactggagttttacccttgtaccagcgaggagatcgaccacgaggatatcacaaaggataagacctccacagtggaggcctgcctgccactggagctgaccaagaacgagtcctgtctgaacagccgggaaaccagcttcatcaccaacggctcctgcctggcctctcgcaagaccagcttcatgatggccctgtgcctgtcctctatctacgaggacctgaagatgtatcaggtggagttcaagaccatgaacgccaagctgctgatggaccctaagcggcagatctttctggatcagaatatgctggccgtgatcgacgagctgatgcaggccctgaacttcaatagcgagacagtgccacagaagagctccctggaggagcccgatttctacaagaccaagatcaagctgtgcatcctgctgcacgcctttcggatcagagccgtgaccatcgacagagtgatgtcctatctgaatgcctcttga

SEQ ID NO: 1812 - DNA, 594 bp, synthetic construct; identical to SEQ ID NO: 1607
  misc_feature 1..594: note = Description of Artificial Sequence: Synthetic Construct
  source 1..594: mol_type = other DNA

SEQ ID NO: 1813 - DNA, 591 bp, synthetic construct; identical to SEQ ID NO: 1608
  misc_feature 1..591: note = Description of Artificial Sequence: Synthetic Construct
  source 1..591: mol_type = other DNA

SEQ ID NO: 1814 - DNA, 588 bp, synthetic construct
  misc_feature 1..588: note = Description of Artificial Sequence: Synthetic Construct
  source 1..588: mol_type = other DNA
aatctgccagtggcaacccctgacccaggaatgttcccttgcctgcaccacagccagaacctgctgagggccgtgtccaatatgctgcagaaggcccgccagacactggagttttacccttgtaccagcgaggagatcgaccacgaggatatcacaaaggataagacctccacagtggaggcctgcctgccactggagctgaccaagaacgagagctgtctgaattcccgggagacatctttcatcaccaacggcagctgcctggcctccagaaagacatcttttatgatggccctgtgcctgtctagcatctacgaggacctgaagatgtatcaggtggagttcaagaccatgaacgccaagctgctgatggaccctaagaggcagatctttctggatcagaatatgctggccgtgatcgacgagctgatgcaggccctgaacttcaatagcgagacagtgccacagaagtcctctctggaggagcccgatttctacaagaccaagatcaagctgtgcatcctgctgcacgcctttaggatccgcgccgtgaccatcgaccgcgtgatgtcttatctgaacgcatcc

SEQ ID NO: 1815 - DNA, 594 bp, synthetic construct; identical to SEQ ID NO: 1610
  misc_feature 1..594: note = Description of Artificial Sequence: Synthetic Construct
  source 1..594: mol_type = other DNA

SEQ ID NO: 1816 - DNA, 597 bp, synthetic construct; identical to SEQ ID NO: 1611
  misc_feature 1..597: note = Description of Artificial Sequence: Synthetic Construct
  source 1..597: mol_type = other DNA

SEQ ID NO: 1817 - DNA, 597 bp, synthetic construct; identical to SEQ ID NO: 1612
  misc_feature 1..597: note = Description of Artificial Sequence: Synthetic Construct
  source 1..597: mol_type = other DNA

SEQ ID NO: 1818 - DNA, 591 bp, synthetic construct; identical to SEQ ID NO: 1613
  misc_feature 1..591: note = Description of Artificial Sequence: Synthetic Construct
  source 1..591: mol_type = other DNA

SEQ ID NO: 1819 - DNA, 558 bp, synthetic construct; identical to SEQ ID NO: 86
  misc_feature 1..558: note = Description of Artificial Sequence: Synthetic destabilizing domain (DD)
  source 1..558: mol_type = other DNA

SEQ ID NO: 1820 - DNA, 558 bp, synthetic construct
  misc_feature 1..558: note = Description of Artificial Sequence: Synthetic destabilizing domain (DD)
  source 1..558: mol_type = other DNA
gttggttcgctaaactgcatcgtcgctgtgtcccagaacatgggcgtcggcaagaacggggacctgccctggccaccgctcaggaatgaattcagatatttccagagaatgaccacaacctcttcagtagaaggtaaacagaatctggtgattatgggtaagaagacctggttctccattcctgagaagaatcgacctttaaagggtagaattaatttagttctcagcagagaactcaaggaacctccacaaggagctcattttctttccagaagtctagatgatgccttaaaacttactgaacaaccagaattagcaaataaagtagacatggtctggatagttggtggcagttctgtttataaggaagccatgaatcacccaggccatcttaaactatttgtgacaaggatcatgcaagactttgaaagtgacacgttttttccagaaattgatttggagaaatataaacttctgccagaatacccaggtgttctctctgatgtccaggaggagaaaggcattaagtacaaatttgaagtatatgagaagaatgat

SEQ ID NO: 1821 - protein, 652 aa, synthetic construct
  REGION 1..652: note = Description of Artificial Sequence: Synthetic construct
MCHQQLVISWFSLVFLASPLVAGVQVETISPGDGRTFPKRGQTCVVHYTGMLEDGKKVDSSRDRNKPFKFMLGKQEVIRGWEEGVAQMSVGQRAKLTISPDYAYGATGHPGIIPPHATLVFDVELLKPEGGSGGIWELKKDVYVVELDWYPDAPGEMVVLTCDTPEEDGITWTLDQSSEVLGSGKTLTIQVKEFGDAGQYTCHKGGEVLSHSLLLLHKKEDGIWSTDILKDQKEPKNKTFLRCEAKNYSGRFTCWWLTTISTDLTFSVKSSRGSSDPQGVTCGAATLSAERVRGDNKEYEYSVECQEDSACPAAEESLPIEVMVDAVHKLKYENYTSSFFIRDIIKPDPPKNLQLKPLKNSRQVEVSWEYPDTWSTPHSYFSLTFCVQVQGKSKREKKDRVFTDKTSATVICRKNASISVRAQDRYYSSSWSEWASVPCSGGGGSGGGGSGGGGSRNLPVATPDPGMFPCLHHSQNLLRAVSNMLQKARQTLEFYPCTSEEIDHEDITKDKTSTVEACLPLELTKNESCLNSRETSFITNGSCLASRKTSFMMALCLSSIYEDLKMYQVEFKTMNAKLLMDPKRQIFLDQNMLAVIDELMQALNFNSETVPQKSSLEEPDFYKTKIKLCILLHAFRIRAVTIDRVMSYLNAS

SEQ ID NO: 1822 - DNA, 1959 bp, synthetic construct
  misc_feature 1..1959: note = Description of Artificial Sequence: Synthetic construct
  source 1..1959: mol_type = other DNA
atgtgccaccagcagctggtcatcagctggttctccctggtgtttctggcatcccctctggtggcaggagtgcaggtggagacaatctctcctggcgatggccggaccttcccaaagagaggccagacatgcgtggtgcactacaccggcatgctggaggacggcaagaaggtggacagctcccgggatagaaacaagccattcaagtttatgctgggcaagcaggaagtgatcaggggatgggaggagggagtggcacagatgtctgtgggccagagagccaagctgacaatcagccctgattacgcatatggagcaaccggacacccaggaatcatcccacctcacgccaccctggtgtttgatgtggagctgctgaagccagagggaggatccggaggcatctgggagctgaagaaggacgtgtacgtggtggagctggactggtatcccgatgcccctggcgagatggtggtgctgacctgcgacacacctgaggaggatggcatcacctggacactggatcagtctagcgaggtgctgggcagcggcaagaccctgacaatccaggtgaaggagttcggcgacgccggccagtacacatgtcacaagggcggcgaggtgctgtctcacagcctgctgctgctgcacaagaaggaggacggcatttggtccacagacatcctgaaggatcagaaggagccaaagaacaagaccttcctgcggtgcgaggccaagaattatagcggccggttcacctgttggtggctgaccacaatcagcaccgatctgacattttccgtgaagtcctctaggggcagctccgacccccagggcgtgacatgcggagcagccaccctgtccgccgagagggtgcgcggcgataacaaggagtacgagtattccgtggagtgccaggaggactctgcctgtccagcagcagaggagagcctgcctatcgaagtgatggtggatgccgtgcacaagctgaagtacgagaattatacatctagcttctttatccgggacatcatcaagcccgatccacccaagaacctgcagctgaagcctctgaagaattctagacaggtggaggtgagctgggagtacccagacacctggtccacaccccactcttatttcagcctgaccttttgcgtgcaggtgcagggcaagagcaagagggagaagaaggaccgcgtgttcaccgataagacatccgccaccgtgatctgtaggaagaacgcctccatctctgtgagggcccaggatcgctactattcctctagctggtccgagtgggcctctgtgccctgtagcggaggaggaggatccggaggaggaggatctggcggcggcggcagccgcaatctgccagtggccacccctgacccaggcatgttcccctgcctgcaccacagccagaacctgctgagggccgtgtccaatatgctgcagaaggcccgccagacactggagttttacccttgtacctctgaggagatcgaccacgaggatatcacaaaggataagaccagcacagtggaggcctgcctgccactggagctgaccaagaacgagtcctgtctgaacagccgggaaaccagcttcatcaccaacggctcctgcctggcctctcgcaagaccagcttcatgatggccctgtgcctgtcctctatctacgaggacctgaagatgtatcaggtggagttcaagaccatgaacgccaagctgctgatggaccctaagcggcagatctttctggatcagaatatgctggccgtgatcgacgagctgatgcaggccctgaacttcaatagcgagacagtgccacagaagagctccctggaggagcccgatttctacaagaccaagatcaagctgtgcatcctgctgcacgcctttcggatcagagccgtgaccatcgacagagtgatgtcctatctgaatgcctcttga

SEQ ID NO: 1823 - protein, 653 aa, synthetic construct
  REGION 1..653: note = Description of Artificial Sequence: Synthetic construct
MGVQVETISPGDGRTFPKRGQTCVVHYTGMLEDGKKVDSSRDRNKPFKFMLGKQEVIRGWEEGVAQMSVGQRAKLTISPDYAYGATGHPGIIPPHATLVFDVELLKPEGGSGGMCHQQLVISWFSLVFLASPLVAIWELKKDVYVVELDWYPDAPGEMVVLTCDTPEEDGITWTLDQSSEVLGSGKTLTIQVKEFGDAGQYTCHKGGEVLSHSLLLLHKKEDGIWSTDILKDQKEPKNKTFLRCEAKNYSGRFTCWWLTTISTDLTFSVKSSRGSSDPQGVTCGAATLSAERVRGDNKEYEYSVECQEDSACPAAEESLPIEVMVDAVHKLKYENYTSSFFIRDIIKPDPPKNLQLKPLKNSRQVEVSWEYPDTWSTPHSYFSLTFCVQVQGKSKREKKDRVFTDKTSATVICRKNASISVRAQDRYYSSSWSEWASVPCSGGGGSGGGGSGGGGSRNLPVATPDPGMFPCLHHSQNLLRAVSNMLQKARQTLEFYPCTSEEIDHEDITKDKTSTVEACLPLELTKNESCLNSRETSFITNGSCLASRKTSFMMALCLSSIYEDLKMYQVEFKTMNAKLLMDPKRQIFLDQNMLAVIDELMQALNFNSETVPQKSSLEEPDFYKTKIKLCILLHAFRIRAVTIDRVMSYLNAS

SEQ ID NO: 1824 - DNA, 1962 bp, synthetic construct
  misc_feature 1..1962: note = Description of Artificial Sequence: Synthetic construct
  source 1..1962: mol_type = other DNA
atgggcgtgcaggtggagacaatctcccctggcgatggccggaccttcccaaagagaggccagacatgcgtggtgcactacaccggcatgctggaggacggcaagaaggtggacagctcccgggatagaaacaagcctttcaagtttatgctgggcaagcaggaagtgatcaggggatgggaggagggagtggcacagatgtctgtgggccagagagccaagctgacaatcagccctgattacgcatatggagcaaccggacacccaggaatcatcccacctcacgccaccctggtgtttgacgtggagctgctgaagccagagggaggatctggaggaatgtgccaccagcagctggtcatcagctggttctccctggtgtttctggccagccctctggtggccatctgggagctgaagaaggacgtgtacgtggtggagctggactggtatcccgatgcccctggcgagatggtggtgctgacctgcgacacaccagaggaggatggcatcacctggacactggatcagtctagcgaggtgctgggcagcggcaagaccctgacaatccaggtgaaggagttcggcgacgccggccagtacacatgtcacaagggcggcgaggtgctgtctcacagcctgctgctgctgcacaagaaggaggacggcatttggtccacagacatcctgaaggatcagaaggagccaaagaacaagaccttcctgcggtgcgaggccaagaattatagcggccggttcacctgttggtggctgaccacaatcagcaccgatctgacattttccgtgaagtcctctaggggcagctccgacccccagggcgtgacatgcggagcagccaccctgtccgccgagagggtgcgcggcgataacaaggagtacgagtattccgtggagtgccaggaggactctgcctgtccagcagcagaggagagcctgcctatcgaagtgatggtggatgccgtgcacaagctgaagtacgagaattatacatctagcttctttatccgggacatcatcaagcccgatccacccaagaacctgcagctgaagcctctgaagaattctagacaggtggaggtgagctgggagtacccagacacctggtccacaccccactcttatttcagcctgaccttttgcgtgcaggtgcagggcaagtccaagagggagaagaaggaccgcgtgttcaccgataagacatctgccaccgtgatctgtaggaagaacgcctccatctctgtgagggcccaggatcgctactattcctctagctggtccgagtgggcctctgtgccctgtagcggaggaggaggatccggaggaggaggatctggcggcggcggcagccgcaatctgccagtggccacccctgacccaggcatgttcccctgcctgcaccacagccagaacctgctgagggccgtgtccaatatgctgcagaaggcccgccagacactggagttttacccttgtaccagcgaggagatcgaccacgaggatatcacaaaggataagacctccacagtggaggcctgcctgccactggagctgaccaagaacgagtcctgtctgaacagccgggaaaccagcttcatcaccaacggctcctgcctggcctctcgcaagaccagcttcatgatggccctgtgcctgtcctctatctacgaggacctgaagatgtatcaggtggagttcaagaccatgaacgccaagctgctgatggaccctaagcggcagatctttctggatcagaatatgctggccgtgatcgacgagctgatgcaggccctgaacttcaatagcgagacagtgccacagaagagctccctggaggagcccgatttctacaagaccaagatcaagctgtgcatcctgctgcacgcctttcggatcagagccgtgaccatcgacagagtgatgtcctatctgaatgcctcttga

SEQ ID NO: 1825 - protein, 656 aa, synthetic construct
  REGION 1..656: note = Description of Artificial Sequence: Synthetic construct
MCHQQLVISWFSLVFLASPLVAGVQVETISPGDGRTFPKRGQTCVVHYTGMLEDGKKVDSSRDRNKPFKFMLGKQEVIRGWEEGVAQMSVGQRAKLTISPDYAYGATGHPGIIPPHATLVFDVELLKPESARNRQKRSIWELKKDVYVVELDWYPDAPGEMVVLTCDTPEEDGITWTLDQSSEVLGSGKTLTIQVKEFGDAGQYTCHKGGEVLSHSLLLLHKKEDGIWSTDILKDQKEPKNKTFLRCEAKNYSGRFTCWWLTTISTDLTFSVKSSRGSSDPQGVTCGAATLSAERVRGDNKEYEYSVECQEDSACPAAEESLPIEVMVDAVHKLKYENYTSSFFIRDIIKPDPPKNLQLKPLKNSRQVEVSWEYPDTWSTPHSYFSLTFCVQVQGKSKREKKDRVFTDKTSATVICRKNASISVRAQDRYYSSSWSEWASVPCSGGGGSGGGGSGGGGSRNLPVATPDPGMFPCLHHSQNLLRAVSNMLQKARQTLEFYPCTSEEIDHEDITKDKTSTVEACLPLELTKNESCLNSRETSFITNGSCLASRKTSFMMALCLSSIYEDLKMYQVEFKTMNAKLLMDPKRQIFLDQNMLAVIDELMQALNFNSETVPQKSSLEEPDFYKTKIKLCILLHAFRIRAVTIDRVMSYLNAS

SEQ ID NO: 1826 - DNA, 1971 bp, synthetic construct
  misc_feature 1..1971: note = Description of Artificial Sequence: Synthetic construct
  source 1..1971: mol_type = other DNA
atgtgccaccagcagctggtcatcagctggttctccctggtgtttctggcaagccctctggtggcaggagtgcaggtggagacaatctcccctggcgatggcaggaccttcccaaagcgcggccagacatgcgtggtgcactacaccggcatgctggaggacggcaagaaggtggacagctcccgggatagaaacaagccattcaagtttatgctgggcaagcaggaagtgatcaggggatgggaggagggagtggcacagatgtccgtgggacagcgcgccaagctgacaatctctcctgattacgcatatggagcaaccggacacccaggaatcatcccacctcacgccaccctggtgtttgacgtggagctgctgaagcccgagagcgccaggaatcgccagaagcggtccatctgggagctgaagaaggacgtgtacgtggtggagctggactggtatcccgatgcccctggcgagatggtggtgctgacctgcgacacacctgaggaggatggcatcacctggacactggatcagtctagcgaggtgctgggctccggcaagaccctgacaatccaggtgaaggagttcggcgacgccggccagtacacatgtcacaagggcggcgaggtgctgtctcacagcctgctgctgctgcacaagaaggaggacggcatctggtccacagacatcctgaaggatcagaaggagccaaagaacaagaccttcctgaggtgcgaggccaagaattatagcggccgctttacctgttggtggctgaccacaatcagcaccgatctgacattttccgtgaagtcctctaggggcagctccgacccccagggcgtgacatgcggagcagccaccctgtccgccgagcgggtgagaggcgataacaaggagtacgagtattccgtggagtgccaggaggactctgcctgtccagcagcagaggagagcctgcctatcgaagtgatggtggatgccgtgcacaagctgaagtacgagaattatacatctagcttctttatcagggacatcatcaagcccgatccacccaagaacctgcagctgaagcctctgaagaattctcgccaggtggaggtgagctgggagtacccagacacctggagcacaccccactcttatttcagcctgaccttttgcgtgcaggtgcagggcaagtctaagcgggagaagaaggacagagtgttcaccgataagacaagcgccaccgtgatctgtcggaagaacgcctccatctctgtgcgggcccaggatagatactattcctctagctggtccgagtgggcctctgtgccctgtagcggaggaggaggatccggaggaggaggatctggcggcggcggcagcagaaatctgccagtggccacccctgacccaggcatgttcccctgcctgcaccactctcagaacctgctgcgggccgtgagcaatatgctgcagaaggccagacagacactggagttttacccttgtacctccgaggagatcgaccacgaggatatcacaaaggataagacctctacagtggaggcctgcctgccactggagctgaccaagaacgagtcctgtctgaacagccgggaaaccagcttcatcaccaacggctcctgcctggcctctagaaagaccagcttcatgatggccctgtgcctgtcctctatctacgaggacctgaagatgtatcaggtggagttcaagaccatgaacgccaagctgctgatggaccctaagaggcagatctttctggatcagaatatgctggccgtgatcgacgagctgatgcaggccctgaacttcaatagcgagacagtgccacagaagagctccctggaggagcccgatttctacaagaccaagatcaagctgtgcatcctgctgcacgcctttaggatccgcgccgtgaccatcgaccgcgtgatgtcctatctgaatgcctcttga

SEQ ID NO: 1827 - protein, 655 aa, synthetic construct
  REGION 1..655: note = Description of Artificial Sequence: Synthetic construct
MCHQQLVISWFSLVFLASPLVAIWELKKDVYVVELDWYPDAPGEMVVLTCDTPEEDGITWTLDQSSEVLGSGKTLTIQVKEFGDAGQYTCHKGGEVLSHSLLLLHKKEDGIWSTDILKDQKEPKNKTFLRCEAKNYSGRFTCWWLTTISTDLTFSVKSSRGSSDPQGVTCGAATLSAERVRGDNKEYEYSVECQEDSACPAAEESLPIEVMVDAVHKLKYENYTSSFFIRDIIKPDPPKNLQLKPLKNSRQVEVSWEYPDTWSTPHSYFSLTFCVQVQGKSKREKKDRVFTDKTSATVICRKNASISVRAQDRYYSSSWSEWASVPCSGGGGSGGGGSGGGGSRNLPVATPDPGMFPCLHHSQNLLRAVSNMLQKARQTLEFYPCTSEEIDHEDITKDKTSTVEACLPLELTKNESCLNSRETSFITNGSCLASRKTSFMMALCLSSIYEDLKMYQVEFKTMNAKLLMDPKRQIFLDQNMLAVIDELMQALNFNSETVPQKSSLEEPDFYKTKIKLCILLHAFRIRAVTIDRVMSYLNASARNRQKRSGVQVETISPGDGRTFPKRGQTCVVHYTGMLGDGKKVDSSRDRNKPFKFMLGKQEVIRGWEEGVAQMSVGQGAKLTISPDYAYGATGHPGIIPPHATLVFDVELLELE

SEQ ID NO: 1828 - DNA, 1968 bp, synthetic construct
  misc_feature 1..1968: note = Description of Artificial Sequence: Synthetic construct
  source 1..1968: mol_type = other DNA
atgtgccaccagcagctggtcatcagctggttctccctggtgtttctggcatccccactggtggcaatctgggagctgaagaaggacgtgtacgtggtggagctggactggtatcccgatgcccctggcgagatggtggtgctgacctgcgacacacctgaggaggatggcatcacctggacactggatcagagctccgaggtgctgggaagcggcaagaccctgacaatccaggtgaaggagttcggcgacgccggccagtacacatgtcacaagggcggcgaggtgctgtctcacagcctgctgctgctgcacaagaaggaggacggcatttggtccacagacatcctgaaggatcagaaggagccaaagaacaagaccttcctgaggtgcgaggccaagaattatagcggccgctttacctgttggtggctgaccacaatcagcaccgatctgacattttccgtgaagtctagcagaggctcctctgacccccagggcgtgacatgcggagcagccaccctgtccgccgagcgggtgagaggcgataacaaggagtacgagtattccgtggagtgccaggaggactctgcctgtcctgcagcagaggagagcctgccaatcgaagtgatggtggatgccgtgcacaagctgaagtacgagaattatacaagctccttctttatcagggacatcatcaagcctgatccccctaagaacctgcagctgaagccactgaagaattctcgccaggtggaggtgagctgggagtacccagacacctggtccacaccccactcttatttcagcctgaccttttgcgtgcaggtgcagggcaagagcaagagggagaagaaggaccgcgtgttcaccgataagacatccgccaccgtgatctgtcggaagaacgcctccatctctgtgcgggcccaggatagatactattctagctcctggtccgagtgggcctctgtgccctgtagcggaggaggaggatccggaggaggaggatctggcggaggaggcagcagaaatctgccagtggcaacccctgacccaggaatgttcccttgcctgcaccacagccagaacctgctgcgggccgtgtccaatatgctgcagaaggccagacagacactggagttttacccttgtacctctgaggagatcgaccacgaggatatcacaaaggataagaccagcacagtggaggcctgcctgccactggagctgaccaagaacgagtcctgtctgaacagccgggaaaccagcttcatcaccaacggctcctgcctggcctctcgcaagaccagcttcatgatggccctgtgcctgtctagcatctacgaggacctgaagatgtatcaggtggagttcaagaccatgaacgccaagctgctgatggaccctaagaggcagatctttctggatcagaatatgctggccgtgatcgacgagctgatgcaggccctgaacttcaatagcgagacagtgccacagaagtcctctctggaggagcccgatttctacaagaccaagatcaagctgtgcatcctgctgcacgcctttaggatccgcgccgtgaccatcgacagagtgatgtcctatctgaacgcctctgcccggaatagacagaagagatctggcgtgcaggtggagacaatcagccccggcgatggccggacctttcctaagagaggccagacatgcgtggtgcactacaccggcatgctgggcgacggcaagaaggtggacagctccagggatcgcaataagcccttcaagtttatgctgggcaagcaggaagtgatcaggggatgggaggagggagtggcacagatgtccgtgggacagggcgccaagctgacaatctctccagattacgcatatggagcaaccggacacccaggaatcatcccaccccacgccaccctggtgttcgacgtggagctgctggagctggagtga

SEQ ID NO: 1829 - protein, 651 aa, synthetic construct
  REGION 1..651: note = Description of Artificial Sequence: Synthetic construct
MCHQQLVISWFSLVFLASPLVAIWELKKDVYVVELDWYPDAPGEMVVLTCDTPEEDGITWTLDQSSEVLGSGKTLTIQVKEFGDAGQYTCHKGGEVLSHSLLLLHKKEDGIWSTDILKDQKEPKNKTFLRCEAKNYSGRFTCWWLTTISTDLTFSVKSSRGSSDPQGVTCGAATLSAERVRGDNKEYEYSVECQEDSACPAAEESLPIEVMVDAVHKLKYENYTSSFFIRDIIKPDPPKNLQLKPLKNSRQVEVSWEYPDTWSTPHSYFSLTFCVQVQGKSKREKKDRVFTDKTSATVICRKNASISVRAQDRYYSSSWSEWASVPCSGGGGSGGGGSGGGGSRNLPVATPDPGMFPCLHHSQNLLRAVSNMLQKARQTLEFYPCTSEEIDHEDITKDKTSTVEACLPLELTKNESCLNSRETSFITNGSCLASRKTSFMMALCLSSIYEDLKMYQVEFKTMNAKLLMDPKRQIFLDQNMLAVIDELMQALNFNSETVPQKSSLEEPDFYKTKIKLCILLHAFRIRAVTIDRVMSYLNASGGSGGVQVETISPGDGRTFPKRGQTCVVHYTGMLGDGKKVDSSRDRNKPFKFMLGKQEVIRGWEEGVAQMSVGQGAKLTISPDYAYGATGHPGIIPPHATLVFDVELLELE

SEQ ID NO: 1830 - DNA, 1956 bp, synthetic construct
  misc_feature 1..1956: note = Description of Artificial Sequence: Synthetic construct
  source 1..1956: mol_type = other DNA
atgtgccaccagcagctggtcatcagctggttctccctggtgtttctggcatccccactggtggcaatctgggagctgaagaaggacgtgtacgtggtggagctggactggtatcccgatgcccctggcgagatggtggtgctgacctgcgacacacctgaggaggatggcatcacctggacactggatcagagctccgaggtgctgggaagcggcaagaccctgacaatccaggtgaaggagttcggcgacgccggccagtacacatgtcacaagggcggcgaggtgctgtctcacagcctgctgctgctgcacaagaaggaggacggcatttggtccacagacatcctgaaggatcagaaggagccaaagaacaagaccttcctgcggtgcgaggccaagaattatagcggccggttcacctgttggtggctgaccacaatcagcaccgatctgacattttccgtgaagtctagccggggctcctctgacccacagggagtgacatgcggagcagccaccctgtccgccgagcgggtgagaggcgataacaaggagtacgagtattccgtggagtgccaggaggactctgcctgtcctgcagcagaggagagcctgccaatcgaagtgatggtggatgccgtgcacaagctgaagtacgagaattatacaagctccttctttatcagggacatcatcaagcctgatccccctaagaacctgcagctgaagccactgaagaattctcgccaggtggaggtgagctgggagtacccagacacctggtccacaccccactcttatttcagcctgaccttttgcgtgcaggtgcagggcaagtccaagcgggagaagaaggacagagtgttcaccgataagacatctgccaccgtgatctgtcggaagaacgcctccatctctgtgagggcccaggatcgctactattctagctcctggagcgagtgggcatccgtgccatgttctggaggaggaggaagcggaggaggaggatccggcggaggaggctctagaaatctgccagtggcaacccctgacccaggaatgttcccttgcctgcaccacagccagaacctgctgagggccgtgtccaatatgctgcagaaggcccgccagacactggagttttacccttgtaccagcgaggagatcgaccacgaggatatcacaaaggataagacctccacagtggaggcctgcctgccactggagctgaccaagaacgagagctgtctgaattcccgggagacatctttcatcaccaacggcagctgcctggcctccagaaagacatcttttatgatggccctgtgcctgtctagcatctacgaggacctgaagatgtatcaggtggagttcaagaccatgaacgccaagctgctgatggaccctaagaggcagatctttctggatcagaatatgctggccgtgatcgacgagctgatgcaggccctgaacttcaatagcgagacagtgccacagaagtcctctctggaggagcccgatttctacaagaccaagatcaagctgtgcatcctgctgcacgcctttaggatccgcgccgtgaccatcgaccgcgtgatgtcttatctgaacgcatccggaggatctggaggagtgcaggtggagacaatcagccccggcgatggcaggacctttcctaagcgcggccagacatgcgtggtgcactacaccggcatgctgggcgacggcaagaaggtggacagctcccgggatagaaataagcccttcaagtttatgctgggcaagcaggaagtgatcagaggctgggaggagggagtggcacagatgtctgtgggacagggcgccaagctgacaatcagcccagattacgcatatggagcaaccggacacccaggaatcatcccaccccacgccaccctggtgttcgacgtggagctgctggagctggagtga

SEQ ID NO: 1831 - protein, 540 aa, synthetic construct
  REGION 1..540: note = Description of Artificial Sequence: Synthetic construct
MCHQQLVISWFSLVFLASPLVAIWELKKDVYVVELDWYPDAPGEMVVLTCDTPEEDGITWTLDQSSEVLGSGKTLTIQVKEFGDAGQYTCHKGGEVLSHSLLLLHKKEDGIWSTDILKDQKEPKNKTFLRCEAKNYSGRFTCWWLTTISTDLTFSVKSSRGSSDPQGVTCGAATLSAERVRGDNKEYEYSVECQEDSACPAAEESLPIEVMVDAVHKLKYENYTSSFFIRDIIKPDPPKNLQLKPLKNSRQVEVSWEYPDTWSTPHSYFSLTFCVQVQGKSKREKKDRVFTDKTSATVICRKNASISVRAQDRYYSSSWSEWASVPCSGGGGSGGGGSGGGGSRNLPVATPDPGMFPCLHHSQNLLRAVSNMLQKARQTLEFYPCTSEEIDHEDITKDKTSTVEACLPLELTKNESCLNSRETSFITNGSCLASRKTSFMMALCLSSIYEDLKMYQVEFKTMNAKLLMDPKRQIFLDQNMLAVIDELMQALNFNSETVPQKSSLEEPDFYKTKIKLCILLHAFRIRAVTIDRVMSYLNAS

SEQ ID NO: 1832 - DNA, 1623 bp, synthetic construct; identical to SEQ ID NO: 172
  misc_feature 1..1623: note = Description of Artificial Sequence: Synthetic construct
  source 1..1623: mol_type = other DNA

SEQ ID NO: 1833 - protein, 710 aa, synthetic construct
  REGION 1..710: note = Description of Artificial Sequence: Synthetic construct
MCHQQLVISWFSLVFLASPLVAISLIAALAVDYVIGMENAMPWNLPADLAWFKRNTLNKPVIMGRHTWESIGRPLPGRKNIILSSQPGTDDRVTWVKSVDEAIAACGDVPEIMVIGGGRVIEQFLPKAQKLYLTHIDAEVEGDTHFPDYEPDDWESVFSEFHDADAQNSHSYCFEILERRESRRVRRNKRSKIWELKKDVYVVELDWYPDAPGEMVVLTCDTPEEDGITWTLDQSSEVLGSGKTLTIQVKEFGDAGQYTCHKGGEVLSHSLLLLHKKEDGIWSTDILKDQKEPKNKTFLRCEAKNYSGRFTCWWLTTISTDLTFSVKSSRGSSDPQGVTCGAATLSAERVRGDNKEYEYSVECQEDSACPAAEESLPIEVMVDAVHKLKYENYTSSFFIRDIIKPDPPKNLQLKPLKNSRQVEVSWEYPDTWSTPHSYFSLTFCVQVQGKSKREKKDRVFTDKTSATVICRKNASISVRAQDRYYSSSWSEWASVPCSGGGGSGGGGSGGGGSRNLPVATPDPGMFPCLHHSQNLLRAVSNMLQKARQTLEFYPCTSEEIDHEDITKDKTSTVEACLPLELTKNESCLNSRETSFITNGSCLASRKTSFMMALCLSSIYEDLKMYQVEFKTMNAKLLMDPKRQIFLDQNMLAVIDELMQALNFNSETVPQKSSLEEPDFYKTKIKLCILLHAFRIRAVTIDRVMSYLNAS

SEQ ID NO: 1834 - DNA, 2130 bp, synthetic construct
  misc_feature 1..2130: note = Description of Artificial Sequence: Synthetic construct
  source 1..2130: mol_type = other DNA
atgtgccaccagcagctggtcatctcttggttcagcctggtgtttctggcctcccccctggtggccatctctctgatcgccgccctggccgtggattacgtgatcggcatggagaacgccatgccatggaatctgccagcagacctggcatggttcaagaggaacacactgaataagccagtgatcatgggcagacacacctgggagtccatcggccggccactgccaggcagaaagaacatcatcctgagctcccagcccggcacagacgatagggtgacctgggtgaagagcgtggacgaggcaatcgcagcatgcggcgatgtgcctgagatcatggtcatcggaggaggacgcgtgatcgagcagttcctgccaaaggcccagaagctgtacctgacacacatcgatgccgaggtggagggcgacacccactttcctgattatgagccagacgattgggagtccgtgttctctgagtttcacgacgccgatgcccagaactctcacagctattgttttgagatcctggagcggagagagtctaggcgcgtgcggagaaataagcggagcaagatctgggagctgaagaaggacgtgtacgtggtggagctggactggtatcccgatgcccctggcgagatggtggtgctgacctgcgacacacccgaggaggatggcatcacctggacactggatcagtctagcgaggtgctgggctccggcaagaccctgacaatccaggtgaaggagttcggcgacgccggccagtacacctgtcacaagggcggcgaggtgctgtcccactctctgctgctgctgcacaagaaggaggacggcatctggtctacagacatcctgaaggatcagaaggagcctaagaacaagaccttcctgcggtgcgaggccaagaattatagcggccggttcacctgttggtggctgaccacaatcagcaccgatctgacattttccgtgaagtcctctcggggcagctccgacccacagggagtgacatgcggagcagccaccctgtccgccgagagggtgcgcggcgataacaaggagtacgagtattccgtggagtgccaggaggactctgcctgtccagcagcagaggagagcctgccaatcgaagtgatggtggatgccgtgcacaagctgaagtacgagaattatacatctagcttctttatccgggacatcatcaagcccgatccccctaagaacctgcagctgaagcctctgaagaattctagacaggtggaggtgagctgggagtaccccgacacctggagcacacctcacagctatttctccctgaccttttgcgtgcaggtgcagggcaagtccaagagggagaagaaggaccgcgtgttcaccgataagacatctgccaccgtgatctgtcggaagaacgccagcatctccgtgagggcccaggatcgctactattcctctagctggtctgagtgggccagcgtgccctgttccggcggcggcggctctggaggaggaggcagcggcggaggaggctccagaaatctgccagtggccacccctgacccaggcatgttcccctgcctgcaccacagccagaacctgctgagggccgtgtccaatatgctgcagaaggcccgccagacactggagttttacccctgtaccagcgaggagatcgaccacgaggatatcacaaaggataagacctccacagtggaggcctgcctgcctctggagctgaccaagaacgagtcttgtctgaatagcagggagacatccttcatcaccaacggctcttgcctggccagccgcaagacatcctttatgatggccctgtgcctgtcctctatctacgaggacctgaagatgtatcaggtggagttcaagaccatgaacgccaagctgctgatggaccctaagaggcagatctttctggatcagaatatgctggccgtgatcgacgagctgatgcaggccctgaacttcaattccgagacagtgcctcagaagagctccctggaggagccagatttctacaagaccaagatcaagctgtgcatcctgctgcacgcctttcggatcagagccgtgaccatcgaccgcgtgatgtcttatctgaatgccagc

SEQ ID NO: 1835 - protein, 738 aa, synthetic construct
  REGION 1..738: note = Description of Artificial Sequence: Synthetic construct
MCHQQLVISWFSLVFLASPLVAVGSLNCIVAVSQNMGIGKNGDLPWPPLRNEFRYFFRMTTTSSVEGKQNLVIMGKKTWFSIPEKNRPLKGRINLVLSRELKEPPQGAHFLSRSLDDALKLTEQPELANKVDMVWIVGGSSVIKEFMNHPGHLKLFVTRIMQDFESDTFFPEIDLEKYKLLPEYPGVLSDVQEEKGIKYKFEVYEKNDESRRVRRNKRSKIWELKKDVYVVELDWYPDAPGEMVVLTCDTPEEDGITWTLDQSSEVLGSGKTLTIQVKEFGDAGQYTCHKGGEVLSHSLLLLHKKEDGIWSTDILKDQKEPKNKTFLRCEAKNYSGRFTCWWLTTISTDLTFSVKSSRGSSDPQGVTCGAATLSAERVRGDNKEYEYSVECQEDSACPAAEESLPIEVMVDAVHKLKYENYTSSFFIRDIIKPDPPKNLQLKPLKNSRQVEVSWEYPDTWSTPHSYFSLTFCVQVQGKSKREKKDRVFTDKTSATVICRKNASISVRAQDRYYSSSWSEWASVPCSGGGGSGGGGSGGGGSRNLPVATPDPGMFPCLHHSQNLLRAVSNMLQKARQTLEFYPCTSEEIDHEDITKDKTSTVEACLPLELTKNESCLNSRETSFITNGSCLASRKTSFMMALCLSSIYEDLKMYQVEFKTMNAKLLMDPKRQIFLDQNMLAVIDELMQALNFNSETVPQKSSLEEPDFYKTKIKLCILLHAFRIRAVTIDRVMSYLNAS

SEQ ID NO: 1836 - DNA, 2214 bp, synthetic construct; identical to SEQ ID NO: 173
  misc_feature 1..2214: note = Description of Artificial Sequence: Synthetic construct
  source 1..2214: mol_type = other DNA

SEQ ID NO: 1837 - protein, 659 aa, synthetic construct
  REGION 1..659: note = Description of Artificial Sequence: Synthetic construct
MCHQQLVISWFSLVFLASPLVAIWELKKDVYVVELDWYPDAPGEMVVLTCDTPEEDGITWTLDQSSEVLGSGKTLTIQVKEFGDAGQYTCHKGGEVLSHSLLLLHKKEDGIWSTDILKDQKEPKNKTFLRCEAKNYSGRFTCWWLTTISTDLTFSVKSSRGSSDPQGVTCGAATLSAERVRGDNKEYEYSVECQEDSACPAAEESLPIEVMVDAVHKLKYENYTSSFFIRDIIKPDPPKNLQLKPLKNSRQVEVSWEYPDTWSTPHSYFSLTFCVQVQGKSKREKKDRVFTDKTSATVICRKNASISVRAQDRYYSSSWSEWASVPCSGGGGSGGGGSGGGGSRNLPVATPDPGMFPCLHHSQNLLRAVSNMLQKARQTLEFYPCTSEEIDHEDITKDKTSTVEACLPLELTKNESCLNSRETSFITNGSCLASRKTSFMMALCLSSIYEDLKMYQVEFKTMNAKLLMDPKRQIFLDQNMLAVIDELMQALNFNSETVPQKSSLEEPDFYKTKIKLCILLHAFRIRAVTIDRVMSYLNASESRRVRRNKRSKGVQVETISPGDGRTFPKRGQTCVVHYTGMLGDGKKVDSSRDRNKPFKFMLGKQEVIRGWEEGVAQMSVGQGAKLTISPDYAYGATGHPGIIPPHATLVFDVELLELE

SEQ ID NO: 1838 - DNA, 1980 bp, synthetic construct
  misc_feature 1..1980: note = Description of Artificial Sequence: Synthetic construct
  source 1..1980: mol_type = other DNA
atgtgccaccagcagctggtcatctcttggttcagcctggtgtttctggcatccccactggtggcaatctgggagctgaagaaggacgtgtacgtggtggagctggactggtatcccgatgcccctggcgagatggtggtgctgacctgcgacacacctgaggaggatggcatcacctggacactggatcagagctccgaggtgctgggcagcggcaagaccctgacaatccaggtgaaggagttcggcgacgccggccagtacacatgtcacaagggcggcgaggtgctgtctcacagcctgctgctgctgcacaagaaggaggacggcatctggtccacagacatcctgaaggatcagaaggagccaaagaacaagaccttcctgaggtgcgaggccaagaattattctggcaggttcacctgttggtggctgaccacaatcagcaccgatctgacattttccgtgaagtctagccggggctcctctgacccccagggagtgacatgcggagcagccaccctgtccgccgagagggtgagaggcgataacaaggagtacgagtattccgtggagtgccaggaggactctgcctgtcctgcagcagaggagagcctgccaatcgaagtgatggtggatgccgtgcacaagctgaagtacgagaattatacaagctccttctttatcagggacatcatcaagcctgatccccctaagaacctgcagctgaagccactgaagaattctagacaggtggaggtgagctgggagtacccagacacctggagcacaccccactcctatttctctctgaccttttgcgtgcaggtgcagggcaagagcaagagggagaagaaggacagagtgttcaccgataagacatccgccaccgtgatctgtcggaagaacgcctccatctctgtgcgggcccaggatcgctactattctagctcctggagcgagtgggcatccgtgccatgttctggaggaggaggcagcggcggaggaggctccggcggcggcggctctcgcaatctgccagtggcaacccctgacccaggaatgttcccttgcctgcaccacagccagaacctgctgcgggccgtgtccaatatgctgcagaaggcccgccagacactggagttttacccttgtacctctgaggagatcgaccacgaggatatcacaaaggataagaccagcacagtggaggcctgcctgccactggagctgaccaagaacgagagctgtctgaattccagggagacatctttcatcaccaacggcagctgcctggcctccagaaagacatcttttatgatggccctgtgcctgtctagcatctacgaggacctgaagatgtatcaggtggagttcaagaccatgaacgccaagctgctgatggaccctaagaggcagatctttctggatcagaatatgctggccgtgatcgacgagctgatgcaggccctgaacttcaattccgagacagtgccacagaagtcctctctggaggagcccgatttctacaagaccaagatcaagctgtgcatcctgctgcacgccttcaggatcagggccgtgaccatcgacagagtgatgagctatctgaacgccagcgagtccaggagagtgcggcgcaacaagaggagcaagggcgtgcaggtggagacaatcagccccggcgatggccggacctttcctaagcgcggccagacatgcgtggtgcactacaccggcatgctgggcgacggcaagaaggtggacagctccagggatagaaacaagccattcaagtttatgctgggcaagcaggaagtgatcagaggatgggaggagggagtggcacagatgtccgtgggacagggcgccaagctgacaatctctccagattacgcatatggagcaaccggacacccaggaatcatcccaccccacgccaccctggtgttcgacgtggagctgctggagctggagtga

SEQ ID NO: 1839 - DNA, 603 bp, synthetic construct; identical to SEQ ID NO: 1795
  misc_feature 1..603: note = Description of Artificial Sequence: Synthetic Promoter
  source 1..603: mol_type = other DNA

SEQ ID NO: 1840 - DNA, 1339 bp, synthetic construct; identical to SEQ ID NO: 1796
  misc_feature 1..1339: note = Description of Artificial Sequence: Synthetic Promoter
  source 1..1339: mol_type = other DNA

SEQ ID NO: 1841 - DNA, 1335 bp, synthetic construct; identical to SEQ ID NO: 1798
  misc_feature 1..1335: note = Description of Artificial Sequence: Synthetic Promoter
  source 1..1335: mol_type = other DNA

SEQ ID NO: 1842 - DNA, 399 bp, synthetic construct; identical to SEQ ID NO: 1797
  misc_feature 1..399: note = Description of Artificial Sequence: Synthetic Promoter
  source 1..399: mol_type = other DNA

SEQ ID NO: 1843 - DNA, 1335 bp, synthetic construct; identical to SEQ ID NO: 1798
  misc_feature 1..1335: note = Description of Artificial Sequence: Synthetic promoter
  source 1..1335: mol_type = other DNA

SEQ ID NO: 1844 - protein, 20 aa, Homo sapiens
MYRMQLLSCIALSLALVTNS

SEQ ID NO: 1845 - DNA, 60 bp, Homo sapiens; identical to SEQ ID NO: 1776
  source 1..60: mol_type = other DNA

SEQ ID NO: 1846 - DNA, 60 bp, synthetic construct; identical to SEQ ID NO: 1777
  misc_feature 1..60: note = Description of Artificial Sequence: Synthetic signal sequence
  source 1..60: mol_type = other DNA

SEQ ID NO: 1847 - DNA, 60 bp, synthetic construct; identical to SEQ ID NO: 1778
  misc_feature 1..60: note = Description of Artificial Sequence: Synthetic signal sequence
  source 1..60: mol_type = other DNA

SEQ ID NO: 1848 - DNA, 60 bp, synthetic construct; identical to SEQ ID NO: 1779
  misc_feature 1..60: note = Description of Artificial Sequence: Synthetic signal sequence
  source 1..60: mol_type = other DNA

SEQ ID NO: 1849 - protein, 18 aa, Homo sapiens
MDWTWILFLVAAATRVHS

SEQ ID NO: 1850 - DNA, 54 bp, Homo sapiens
  source 1..54: mol_type = other DNA
atggactggacatggatactcttcctggtagcagccgccacacgagtgcacagc

SEQ ID NO: 1851 - DNA, 54 bp, Homo sapiens
  source 1..54: mol_type = other DNA
atggactggacctggattctgtttctggtggccgctgccacaagagtgcacagc

SEQ ID NO: 1852 - DNA, 54 bp, Homo sapiens
  source 1..54: mol_type = other DNA
atggattggacctggattctgtttctggtggccgctgccacaagagtgcacagc

SEQ ID NO: 1853 - protein, 6 aa, synthetic construct
  REGION 1..6: note = Description of Artificial Sequence: Synthetic linker
EFSTEF

SEQ ID NO: 1854 - DNA, 18 bp, synthetic construct
  misc_feature 1..18: note = Description of Artificial Sequence: Synthetic linker
  source 1..18: mol_type = other DNA
gagttcagcaccgagttt

SEQ ID NO: 1855 - DNA, 18 bp, synthetic construct
  misc_feature 1..18: note = Description of Artificial Sequence: Synthetic linker
  source 1..18: mol_type = other DNA
gagttctccaccgagttc

SEQ ID NO: 1856 - protein, 134 aa, synthetic construct
  REGION 1..134: note = Description of Artificial Sequence: Synthetic polypeptide
MYRMQLLSCIALSLALVTNSNWVNVISDLKKIEDLIQSMHIDATLYTESDVHPSCKVTAMKCFLLELQVISLESGDASIHDTVENLIILANNSLSSNGNVTESGCKECEELEEKNIKEFLQSFVHIVQMFINTS

SEQ ID NO: 1857 - DNA, 405 bp, synthetic construct
  misc_feature 1..405: note = Description of Artificial Sequence: Synthetic polynucleotide
  source 1..405: mol_type = other DNA
atgtacaggatgcagctgctgagctgcatcgccctgagcctggccctggtgaccaacagcaactgggtgaacgtgatctccgacctgaagaagatcgaggacctgatccagtccatgcacatcgacgccaccctgtacaccgagagcgacgtgcaccctagctgcaaggtgaccgccatgaagtgcttcctgctggagctgcaggtgatcagcctggagagcggcgatgccagcatccacgacacagtggagaacctgatcatcctggccaacaacagcctgagcagcaacggcaatgtgaccgagagcggctgcaaggagtgcgaggagctggaggagaagaacatcaaggagttcctgcagtccttcgtgcacatcgtgcagatgttcatcaacaccagctaa

SEQ ID NO: 1858 - protein, 303 aa, synthetic construct
  REGION 1..303: note = Description of Artificial Sequence: Synthetic polypeptide
MYRMQLLSCIALSLALVTNSEFSTEFISLIAALAVDYVIGMENAMPWNLPADLAWFKRNTLNKPVIMGRHTWESIGRPLPGRKNIILSSQPGTDDRVTWVKSVDEAIAACGDVPEIMVIGGGRVIEQFLPKAQKLYLTHIDAEVEGDTHFPDYEPDDWESVFSEFHDADAQNSHSYCFEILERRGGSGGNWVNVISDLKKIEDLIQSMHIDATLYTESDVHPSCKVTAMKCFLLELQVISLESGDASIHDTVENLIILANNSLSSNGNVTESGCKECEELEEKNIKEFLQSFVHIVQMFINTS

SEQ ID NO: 1859 - DNA, 912 bp, synthetic construct
  misc_feature 1..912: note = Description of Artificial Sequence: Synthetic polynucleotide
  source 1..912: mol_type = other DNA
atgtacagaatgcagctgctgagctgcatcgccctgtccctcgccctggtgaccaactccgagttctccaccgagttcatctccctgatcgccgccctggccgtggattatgtgatcggcatggagaacgccatgccctggaatctgcccgccgacctggcctggttcaagaggaataccctgaacaagcccgtcatcatgggcaggcacacctgggaaagcatcggcagacccctgcccggcaggaagaacatcatcctgtccagccagcccggcaccgacgacagagtgacctgggtgaagagcgtggacgaagctatcgccgcttgcggcgacgtgcccgagatcatggtgatcggcggcggcagggtgatcgaacagttcctgcccaaggcccagaagctgtacctgacccacatcgatgccgaggtggaaggcgatacacacttccccgattacgaacctgacgactgggaaagcgtgttttccgaattccacgacgccgacgcccagaacagccacagctactgcttcgagatcctggaaagaaggggaggctccggcggaaactgggtcaacgtgatcagcgacctgaagaagatcgaggacctcatccagtccatgcacattgacgccaccctgtacaccgagtccgatgtgcaccctagctgcaaggtgaccgccatgaaatgcttcctgctggagctgcaggtcatctccttagaaagcggcgatgcctccatccacgacaccgtggagaacctgatcatcctggccaataactccctgagcagcaacggcaacgtgaccgagagcggctgcaaagagtgtgaagagctggaggagaagaacattaaggagttcctgcagagcttcgtgcacatcgtgcaaatgttcatcaacaccagctaa

SEQ ID NO: 1860 - protein, 143 aa, synthetic construct
  REGION 1..143: note = Description of Artificial Sequence: Synthetic polypeptide
MDWTWILFLVAAATRVHSYPYDVPDYANWVNVISDLKKIEDLIQSMHIDATLYTESDVHPSCKVTAMKCFLLELQVISLESGDASIHDTVENLIILANNSLSSNGNVTESGCKECEELEEKNIKEFLQSFVHIVQMFINTSGS

SEQ ID NO: 1861 - DNA, 432 bp, synthetic construct
  misc_feature 1..432: note = Description of Artificial Sequence: Synthetic polynucleotide
  source 1..432: mol_type = other DNA
atggactggacatggatactcttcctggtagcagccgccacacgagtgcacagctacccatacgatgttccagattacgctaactgggtgaacgtgatctccgacctgaaaaagatcgaggatttgatccagagcatgcacattgacgccaccctgtataccgagtccgacgtgcacccgagttgcaaggtgactgccatgaagtgcttcctgctggagctgcaagtgatcagcctggagagcggcgacgccagcatccacgacaccgtggaaaaccttatcattctggccaacaatagcctgagcagcaacggcaacgtgaccgaaagcggatgtaaggaatgcgaggaactggaagagaagaatatcaaagaattcctgcaaagcttcgtgcacatcgtgcagatgttcatcaacacttctggatcctga

SEQ ID NO: 1862 - protein, 389 aa, synthetic construct
  REGION 1..389: note = Description of Artificial Sequence: Synthetic polypeptide
MDWTWILFLVAAATRVHSNWVNVISDLKKIEDLIQSMHIDATLYTESDVHPSCKVTAMKCFLLELQVISLESGDASIHDTVENLIILANNSLSSNGNVTESGCKECEELEEKNIKEFLQSFVHIVQMFINTSGSGATNFSLLKQAGDVEENPGPLSKGEEDNMAIIKEFMRFKVHMEGSVNGHEFEIEGEGEGRPYEGTQTAKLKVTKGGPLPFAWDILSPQFMYGSKAYVKHPADIPDYLKLSFPEGFKWERVMNFEDGGVVTVTQDSSLQDGEFIYKVKLRGTNFPSDGPVMQKKTMGWEASSERMYPEDGALKGEIKQRLKLKDGGHYDAEVKTTYKAKKPVQLPGAYNVNIKLDITSHNEDYTIVEQYERAEGRHSTGGMDELYK

SEQ ID NO: 1863 - DNA, 1170 bp, synthetic construct
  misc_feature 1..1170: note = Description of Artificial Sequence: Synthetic polynucleotide
  source 1..1170: mol_type = other DNA
atggactggacatggatactcttcctggtagcagccgccacacgagtgcacagcaactgggtgaatgtaataagtgatttgaaaaaaattgaagatcttattcaatctatgcatattgatgctactttatatacggaaagtgatgttcaccccagttgcaaagtaacagcaatgaagtgctttctcttggagttacaagttatttcacttgagtccggagatgcaagtattcatgatacagtagaaaatctgatcatcctagcaaacaacagtttgtcttctaatgggaatgtaacagaatctggatgcaaagaatgtgaggaactggaggaaaaaaatattaaagaatttttgcagagttttgtacatattgtccaaatgttcatcaacacttctggatccggagctactaacttcagcctgctgaagcaggctggagacgtggaggagaaccctggacctttgagcaagggcgaggaggacaacatggccatcatcaaggagttcatgcgcttcaaggtgcacatggagggctccgtgaacggccacgagttcgagatcgagggcgagggcgagggccgcccctacgagggcacccagaccgccaagctgaaggtgaccaagggcggccccctgcccttcgcctgggacatcctgtcccctcagttcatgtacggctccaaggcctacgtgaagcaccccgccgacatccccgactacttgaagctgtccttccccgagggcttcaagtgggagcgcgtgatgaacttcgaggacggcggcgtggtgaccgtgacccaggactcctccctgcaggacggcgagttcatctacaaggtgaagctgcgcggcaccaacttcccctccgacggccccgtaatgcagaagaagaccatgggctgggaggcctcctccgagcggatgtaccccgaggacggcgccctgaagggcgagatcaagcagaggctgaagctgaaggacggcggccactacgacgccgaggtcaagaccacctacaaggccaagaagcccgtgcagctgcccggcgcctacaacgtcaacatcaagctggacatcacctcccacaacgaggactacaccatcgtggaacagtacgagcgcgccgagggccgccactccaccggcggcatggacgagctgtacaagtaa

SEQ ID NO: 1864 - protein, 577 aa, synthetic construct
  REGION 1..577: note = Description of Artificial Sequence: Synthetic polypeptide
MDWTWILFLVAAATRVHSNWVNVISDLKKIEDLIQSMHIDATLYTESDVHPSCKVTAMKCFLLELQVISLESGDASIHDTVENLIILANNSLSSNGNVTESGCKECEELEEKNIKEFLQSFVHIVQMFINTSGSVGSLNCIVAVSQNMGIGKNGDLPWPPLRNEFRYFQRMTTTSSVEGKQNLVIMGKKTWFSIPEKNRPLKGRINLVLSRELKEPPQGAHFLSRSLDDALKLTEQPELANKVDMVWIVGGSSVIKEAMNHPGHLKLFVTRIMQDFESDTFFPEIDLEKYKLLPEYPGVLSDVQEEKGIKYKFEVYEKNDGSGATNFSLLKQAGDVEENPGPLSKGEEDNMAIIKEFMRFKVHMEGSVNGHEFEIEGEGEGRPYEGTQTAKLKVTKGGPLPFAWDILSPQFMYGSKAYVKHPADIPDYLKLSFPEGFKWERVMNFEDGGVVTVTQDSSLQDGEFIYKVKLRGTNFPSDGPVMQKKTMGWEASSERMYPEDGALKGEIKQRLKLKDGGHYDAEVKTTYKAKKPVQLPGAYNVNIKLDITSHNEDYTIVEQYERAEGRHSTGGMDELYK

SEQ ID NO: 1865 - DNA, 1734 bp, synthetic construct
  misc_feature 1..1734: note = Description of Artificial Sequence: Synthetic polynucleotide
  source 1..1734: mol_type = other DNA
atggactggacatggatactcttcctggtagcagccgccacacgagtgcacagcaactgggtgaatgtaataagtgatttgaaaaaaattgaagatcttattcaatctatgcatattgatgctactttatatacggaaagtgatgttcaccccagttgcaaagtaacagcaatgaagtgctttctcttggagttacaagttatttcacttgagtccggagatgcaagtattcatgatacagtagaaaatctgatcatcctagcaaacaacagtttgtcttctaatgggaatgtaacagaatctggatgcaaagaatgtgaggaactggaggaaaaaaatattaaagaatttttgcagagttttgtacatattgtccaaatgttcatcaacacttctggttccgttggttcgctaaactgcatcgtcgctgtgtcccagaacatgggcatcggcaagaacggggacctgccctggccaccgctcaggaatgaattcagatatttccagagaatgaccacaacctcttcagtagaaggtaaacagaatctggtgattatgggtaagaagacctggttctccattcctgagaagaatcgacctttaaagggtagaattaatttagttctcagcagagaactcaaggaacctccacaaggagctcattttctttccagaagtctagatgatgccttaaaacttactgaacaaccagaattagcaaataaagtagacatggtctggatagttggtggcagttctgttattaaggaagccatgaatcacccaggccatcttaaactatttgtgacaaggatcatgcaagactttgaaagtgacacgttttttccagaaattgatttggagaaatataaacttctgccagaatacccaggtgttctctctgatgtccaggaggagaaaggcattaagtacaaatttgaagtatatgagaagaatgatggatccggagctactaacttcagcctgctgaagcaggctggagacgtggaggagaaccctggacctttgagcaagggcgaggaggacaacatggccatcatcaaggagttcatgcgcttcaaggtgcacatggagggctccgtgaacggccacgagttcgagatcgagggcgagggcgagggccgcccctacgagggcacccagaccgccaagctgaaggtgaccaagggcggccccctgcccttcgcctgggacatcctgtcccctcagttcatgtacggctccaaggcctacgtgaagcaccccgccgacatccccgactacttgaagctgtccttccccgagggcttcaagtgggagcgcgtgatgaacttcgaggacggcggcgtggtgaccgtgacccaggactcctccctgcaggacggcgagttcatctacaaggtgaagctgcgcggcaccaacttcccctccgacggccccgtaatgcagaagaagaccatgggctgggaggcctcctccgagcggatgtaccccgaggacggcgccctgaagggcgagatcaagcagaggctgaagctgaaggacggcggccactacgacgccgaggtcaagaccacctacaaggccaagaagcccgtgcagctgcccggcgcctacaacgtcaacatcaagctggacatcacctcccacaacgaggactacaccatcgtggaacagtacgagcgcgccgagggccgccactccaccggcggcatggacgagctgtacaagtaa

SEQ ID NO: 1866 - DNA, 603 bp, synthetic construct; identical to SEQ ID NO: 1795
  misc_feature 1..603: note = Description of Artificial Sequence: Synthetic promoter
  source 1..603: mol_type = other DNA

SEQ ID NO: 1867 - DNA, 1339 bp, synthetic construct; identical to SEQ ID NO: 1796
  misc_feature 1..1339: note = Description of Artificial Sequence: Synthetic promoter
  source 1..1339: mol_type = other DNA

SEQ ID NO: 1868 - DNA, 1335 bp, synthetic construct; identical to SEQ ID NO: 1798
  misc_feature 1..1335: note = Description of Artificial Sequence: Synthetic promoter
  source 1..1335: mol_type = other DNA

SEQ ID NO: 1869 - DNA, 399 bp, synthetic construct; identical to SEQ ID NO: 1797
  misc_feature 1..399: note = Description of Artificial Sequence: Synthetic promoter
  source 1..399: mol_type = other DNA

SEQ ID NO: 1870 - skipped

SEQ ID NO: 1871 - protein, 20 aa, Homo sapiens
MYRMQLLSCIALSLALVTNS

SEQ ID NO: 1872 - DNA, 60 bp, Homo sapiens; identical to SEQ ID NO: 1776
  source 1..60: mol_type = other DNA

SEQ ID NO: 1873 - DNA, 60 bp, synthetic construct; identical to SEQ ID NO: 1777
  misc_feature 1..60: note = Description of Artificial Sequence: Synthetic signal sequence
  source 1..60: mol_type = other DNA

SEQ ID NO: 1874 - DNA, 60 bp, synthetic construct; identical to SEQ ID NO: 1778
  misc_feature 1..60: note = Description of Artificial Sequence: Synthetic signal sequence
  source 1..60: mol_type = other DNA

SEQ ID NO: 1875 - DNA, 60 bp, synthetic construct; identical to SEQ ID NO: 1779
  misc_feature 1..60: note = Description of Artificial Sequence: Synthetic signal sequence
  source 1..60: mol_type = other DNA

SEQ ID NO: 1876 - protein, 18 aa, Homo sapiens
MDWTWILFLVAAATRVHS

SEQ ID NO: 1877 - DNA, 54 bp, Homo sapiens; identical to SEQ ID NO: 1850
  source 1..54: mol_type = other DNA

SEQ ID NO: 1878 - DNA, 54 bp, synthetic construct; identical to SEQ ID NO: 1851
  misc_feature 1..54: note = Description of Artificial Sequence: Synthetic signal sequence
  source 1..54: mol_type = other DNA

SEQ ID NO: 1879 - DNA, 54 bp, synthetic construct; identical to SEQ ID NO: 1852
  misc_feature 1..54: note = Description of Artificial Sequence: Synthetic signal sequence
  source 1..54: mol_type = other DNA

SEQ ID NO: 1880 - protein, 6 aa, synthetic construct
  REGION 1..6: note = Description of Artificial Sequence: Synthetic linker
EFSTEF

SEQ ID NO: 1881 - DNA, 18 bp, synthetic construct
  misc_feature 1..18: note = Description of Artificial Sequence: Synthetic linker
  source 1..18: mol_type = other DNA
gagttcagcaccgagttt

SEQ ID NO: 1882 - DNA, 18 bp, synthetic construct
  misc_feature 1..18: note = Description of Artificial Sequence: Synthetic linker
  source 1..18: mol_type = other DNA
gagttctccaccgagttc

SEQ ID NO: 1883 - protein, 5 aa, synthetic construct
  REGION 1..5: note = Description of Artificial Sequence: Synthetic linker
GGSGG

SEQ ID NO: 1884 - DNA, 15 bp, synthetic construct
  misc_feature 1..15: note = Description of Artificial Sequence: Synthetic linker
  source 1..15: mol_type = other DNA
ggaggcagcggagga

SEQ ID NO: 1885 - DNA, 15 bp, synthetic construct
  misc_feature 1..15: note = Description of Artificial Sequence: Synthetic linker
  source 1..15: mol_type = other DNA
ggaggctctggagga

SEQ ID NO: 1886 - DNA, 15 bp, synthetic construct
  misc_feature 1..15: note = Description of Artificial Sequence: Synthetic linker
  source 1..15: mol_type = other DNA
ggaggctccggcgga

SEQ ID NO: 1887 - DNA, 15 bp, synthetic construct
  misc_feature 1..15: note = Description of Artificial Sequence: Synthetic linker
  source 1..15: mol_type = other DNA
ggaggatccggaggc

SEQ ID NO: 1888 - DNA, 15 bp, synthetic construct
  misc_feature 1..15: note = Description of Artificial Sequence: Synthetic linker
  source 1..15: mol_type = other DNA
ggaggatctggagga

SEQ ID NO: 1889 - protein, 9 aa, synthetic construct
  REGION 1..9: note = Description of Artificial Sequence: Synthetic HA Tag
YPYDVPDYA

SEQ ID NO: 1890 - DNA, 27 bp, synthetic construct
  misc_feature 1..27: note = Description of Artificial Sequence: Synthetic HA Tag
  source 1..27: mol_type = other DNA
tacccatacgatgttccagattacgct

SEQ ID NO: 1891 - DNA, 27 bp, synthetic construct
  misc_feature 1..27: note = Description of Artificial Sequence: Synthetic HA Tag
  source 1..27: mol_type = other DNA
tatccttacgatgtgcccgactatgct

SEQ ID NO: 1892 - skipped

SEQ ID NO: 1893 - protein, 20 aa, synthetic construct
  REGION 1..20: note = Description of Artificial Sequence: Synthetic Cleavable peptide
GATNFSLLKQAGDVEENPGP

SEQ ID NO: 1894 - DNA, 60 bp, synthetic construct; identical to SEQ ID NO: 1806
  misc_feature 1..60: note = Description of Artificial Sequence: Synthetic Cleavable peptide
  source 1..60: mol_type = other DNA

SEQ ID NO: 1895 - protein, 235 aa, synthetic construct; identical to SEQ ID NO: 1625
  REGION 1..235: note = Description of Artificial Sequence: Synthetic polypeptide

SEQ ID NO: 1896 - DNA, 708 bp, synthetic construct
  misc_feature 1..708: note = Description of Artificial Sequence: Synthetic polynucleotide
  source 1..708: mol_type = other DNA
ttgagcaagggcgaggaggacaacatggccatcatcaaggagttcatgcgcttcaaggtgcacatggagggctccgtgaacggccacgagttcgagatcgagggcgagggcgagggccgcccctacgagggcacccagaccgccaagctgaaggtgaccaagggcggccccctgcccttcgcctgggacatcctgtcccctcagttcatgtacggctccaaggcctacgtgaagcaccccgccgacatccccgactacttgaagctgtccttccccgagggcttcaagtgggagcgcgtgatgaacttcgaggacggcggcgtggtgaccgtgacccaggactcctccctgcaggacggcgagttcatctacaaggtgaagctgcgcggcaccaacttcccctccgacggccccgtaatgcagaagaagaccatgggctgggaggcctcctccgagcggatgtaccccgaggacggcgccctgaagggcgagatcaagcagaggctgaagctgaaggacggcggccactacgacgccgaggtcaagaccacctacaaggccaagaagcccgtgcagctgcccggcgcctacaacgtcaacatcaagctggacatcacctcccacaacgaggactacaccatcgtggaacagtacgagcgcgccgagggccgccactccaccggcggcatggacgagctgtacaagtaa

SEQ ID NO: 1897 - DNA, 345 bp, Homo sapiens; identical to SEQ ID NO: 168
  source 1..345: mol_type = other DNA

SEQ ID NO: 1898 - DNA, 345 bp, synthetic construct; identical to SEQ ID NO: 1617
  misc_feature 1..345: note = Description of Artificial Sequence: Synthetic construct
  source 1..345: mol_type = other DNA

SEQ ID NO: 1899 - DNA, 345 bp, synthetic construct; identical to SEQ ID NO: 1618
  misc_feature 1..345: note = Description of Artificial Sequence: Synthetic construct
  source 1..345: mol_type = other DNA

SEQ ID NO: 1900 - DNA, 474 bp, synthetic construct; identical to SEQ ID NO: 1676
  misc_feature 1..474: note = Description of Artificial Sequence: Synthetic Destabilizing Domain (DD)
  source 1..474: mol_type = other DNA

SEQ ID NO: 1901 - DNA, 342 bp, synthetic construct; identical to SEQ ID NO: 1620
  misc_feature 1..342: note = Description of Artificial Sequence: Synthetic construct
  source 1..342: mol_type = other DNA

SEQ ID NO: 1902 - DNA, 342 bp, synthetic construct
  misc_feature 1..342: note = Description of Artificial Sequence: Synthetic construct
  source 1..342: mol_type = other DNA
aactgggtgaatgtaataagtgatttgaaaaaaattgaagatcttattcaatctatgcatattgatgctactttatatacggaaagtgatgttcaccccagttgcaaagtaacagcaatgaagtgctttctcttggagttacaagttatttcacttgagtccggagatgcaagtattcatgatacagtagaaaatctgatcatcctagcaaacaacagtttgtcttctaatgggaatgtaacagaatctggatgcaaagaatgtgaggaactggaggaaaaaaatattaaagaatttttgcagagttttgtacatattgtccaaatgttcatcaacacttct

SEQ ID NO: 1903 - protein, 158 aa, synthetic construct; identical to SEQ ID NO: 1174
  REGION 1..158: note = Description of Artificial Sequence: Synthetic Destabilizing Domain (DD)

SEQ ID NO: 1904 - DNA, 474 bp, synthetic construct; identical to SEQ ID NO: 1676
  misc_feature 1..474: note = Description of Artificial Sequence: Synthetic Destabilizing Domain (DD)
  source 1..474: mol_type = other DNA

SEQ ID NO: 1905 - DNA, 474 bp, synthetic construct; identical to SEQ ID NO: 1678
  misc_feature 1..474: note = Description of Artificial Sequence: Synthetic Destabilizing Domain (DD)
  source 1..474: mol_type = other DNA

SEQ ID NO: 1906 - DNA, 477 bp, synthetic construct; identical to SEQ ID NO: 1677
  misc_feature 1..477: note = Description of Artificial Sequence: Synthetic Destabilizing Domain (DD)
  source 1..477: mol_type = other DNA

SEQ ID NO: 1907 - protein, 186 aa, synthetic construct; identical to SEQ ID NO: 13
  REGION 1..186: note = Description of Artificial Sequence: Synthetic Destabilizing Domain (DD)

SEQ ID NO: 1908 - DNA, 558 bp, synthetic construct; identical to SEQ ID NO: 1685
  misc_feature 1..558: note = Description of Artificial Sequence: Synthetic Destabilizing Domain (DD)
  source 1..558: mol_type = other DNA

SEQ ID NO: 1909 - protein, 134 aa, synthetic construct; identical to SEQ ID NO: 1856
  REGION 1..134: note = Description of Artificial Sequence: Synthetic polypeptide

SEQ ID NO: 1910 - DNA, 405 bp, synthetic construct; identical to SEQ ID NO: 1857
  misc_feature 1..405: note = Description of Artificial Sequence: Synthetic polynucleotide
  source 1..405: mol_type = other DNA

SEQ ID NO: 1911 - protein, 303 aa, synthetic construct; identical to SEQ ID NO: 1858
  REGION 1..303: note = Description of Artificial Sequence: Synthetic polypeptide

SEQ ID NO: 1912 - DNA, 912 bp, synthetic construct; identical to SEQ ID NO: 1859
  misc_feature 1..912: note = Description of Artificial Sequence: Synthetic polynucleotide
  source 1..912: mol_type = other DNA

SEQ ID NO: 1913 - protein, 143 aa, synthetic construct; identical to SEQ ID NO: 1860
  REGION 1..143: note = Description of Artificial Sequence: Synthetic polypeptide

SEQ ID NO: 1914 - DNA, 432 bp, synthetic construct; identical to SEQ ID NO: 1861
  misc_feature 1..432: note = Description of Artificial Sequence: Synthetic polynucleotide
  source 1..432: mol_type = other DNA

SEQ ID NO: 1915 - protein, 389 aa, synthetic construct; identical to SEQ ID NO: 1862
  REGION 1..389: note = Description of Artificial Sequence: Synthetic polypeptide

SEQ ID NO: 1916 - DNA, 1170 bp, synthetic construct; identical to SEQ ID NO: 1863
  misc_feature 1..1170: note = Description of Artificial Sequence: Synthetic polynucleotide
  source 1..1170: mol_type = other DNA

SEQ ID NO: 1917 - protein, 577 aa, synthetic construct; identical to SEQ ID NO: 1864
  REGION 1..577: note = Description of Artificial Sequence: Synthetic polypeptide

SEQ ID NO: 1918 - DNA, 1734 bp, synthetic construct; identical to SEQ ID NO: 1865
  misc_feature 1..1734: note = Description of Artificial Sequence: Synthetic polynucleotide
  source 1..1734: mol_type = other DNA

SEQ ID NO: 1919 - protein, 30 aa, Homo sapiens
MAPRRARGCRTLGLPALLLLLLLRPPATRG

SEQ ID NO: 1920 - DNA, 90 bp, synthetic construct; identical to SEQ ID NO: 1724
  misc_feature 1..90: note = Description of Artificial Sequence: Synthetic construct
  source 1..90: mol_type = other DNA

SEQ ID NO: 1921 - protein, 5 aa, synthetic construct
  REGION 1..5: note = Description of Artificial Sequence: Synthetic linker
SGGGS

SEQ ID NO: 1922 - DNA, 15 bp, synthetic construct
  misc_feature 1..15: note = Description of Artificial Sequence: Synthetic linker
  source 1..15: mol_type = other DNA
tcaggtggcggtagt

SEQ ID NO: 1923 - DNA, 15 bp, synthetic construct
  misc_feature 1..15: note = Description of Artificial Sequence: Synthetic linker
  source 1..15: mol_type = other DNA
agcggcggtggcagc

SEQ ID NO: 1924 - protein, 34 aa, synthetic construct
  REGION 1..34: note = Description of Artificial Sequence: Synthetic linker
SGGGSGGGGSGGGGSGGGGSGGGGSGGGGSGGGS

SEQ ID NO: 1925 - DNA, 102 bp, synthetic construct
  misc_feature 1..102: note = Description of Artificial Sequence: Synthetic linker
  source 1..102: mol_type = other DNA
tctggtggcgggagtggaggaggtgggtccggagggggagggagcggtggtggaggttccggcggggggggtagtggaggcggagggtcaggtgggggcagc

SEQ ID NO: 1926 - protein, 20 aa, synthetic construct
  REGION 1..20: note = Description of Artificial Sequence: Synthetic linker
SGGGSGGGGSGGGGSGGGGS

SEQ ID NO: 1927 - DNA, 60 bp, synthetic construct
  misc_feature 1..60: note = Description of Artificial Sequence: Synthetic linker
  source 1..60: mol_type = other DNA
agtggtggcgggtccggcggtggtggtagcgggggtggaggctcaggtggcggtggcagt

SEQ ID NO: 1928-1931 - skipped (4 entries)

SEQ ID NO: 1932 - DNA, 28 bp, synthetic construct
  misc_feature 1..28: note = Description of Artificial Sequence: Synthetic spacer
  source 1..28: mol_type = other DNA
tctagataatacgactcactagagatcc

SEQ ID NO: 1933 - DNA, 16 bp, synthetic construct
  misc_feature 1..16: note = Description of Artificial Sequence: Synthetic spacer
  source 1..16: mol_type = other DNA
tatggccacaaccatg

SEQ ID NO: 1934 - DNA, 30 bp, synthetic construct
  misc_feature 1..30: note = Description of Artificial Sequence: Synthetic spacer
  source 1..30: mol_type = other DNA
aatctagataatacgactcactagagatcc

SEQ ID NO: 1935-1936 - skipped (2 entries)

SEQ ID NO: 1937 - protein, 175 aa, synthetic construct; identical to SEQ ID NO: 725
  REGION 1..175: note = Description of Artificial Sequence: Synthetic construct

SEQ ID NO: 1938 - DNA, 525 bp, synthetic construct
  misc_feature 1..525: note = Description of Artificial Sequence: Synthetic construct
  source 1..525: mol_type = other DNA
attacctgcccccctccgatgagcgtggagcacgccgacatctgggtcaagagctacagcttgtatagtagggagcggtacatctgtaacagcgggttcaagaggaaggccgggaccagctcactgaccgagtgcgtgttgaacaaggccaccaacgtggcccactggaccacccctagccttaagtgcatcagggacccagcgctcgtacaccagagacccgcgcctccctctacggtaaccacggcaggcgtaaccccccagcccgagagcctgtccccgagcggcaaggagcctgcagcgagcagcccctcaagcaacaacacagccgctaccaccgcggcaatcgtgcccggcagccagctgatgccctcaaagagccccagcaccggcaccactgagataagcagccacgagagctcacacggcactccctcacagaccactgccaagaattgggagctgaccgcctctgccagccaccagcccccaggcgtgtatccccagggccacagcgacaccacg

SEQ ID NO: 1939 - protein, 235 aa, synthetic construct
  REGION 1..235: note = Description of Artificial Sequence: Synthetic construct
MSKGEEDNMAIIKEFMRFKVHMEGSVNGHEFEIEGEGEGRPYEGTQTAKLKVTKGGPLPFAWDILSPQFMYGSKAYVKHPADIPDYLKLSFPEGFKWERVMNFEDGGVVTVTQDSSLQDGEFIYKVKLRGTNFPSDGPVMQKKTMGWEASSERMYPEDGALKGEIKQRLKLKDGGHYDAEVKTTYKAKKPVQLPGAYNVNIKLDITSHNEDYTIVEQYERAEGRHSTGGMDELYK

SEQ ID NO: 1940 - DNA, 708 bp, synthetic construct
  misc_feature 1..708: note = Description of Artificial Sequence: Synthetic construct
  source 1..708: mol_type = other DNA
atgagcaagggcgaggaggataacatggccatcatcaaggagttcatgcgcttcaaggtgcacatggagggctccgtgaacggccacgagttcgagatcgagggcgagggcgagggccgcccctacgagggcacccagaccgccaagctgaaggtgaccaagggtggccccctgcccttcgcctgggacatcctgtcccctcagttcatgtacggctccaaggcctacgtgaagcaccccgccgacatccccgactacttgaagctgtccttccccgagggcttcaagtgggagcgcgtgatgaacttcgaggacggcggcgtggtgaccgtgacccaggactcctccctgcaggacggcgagttcatctacaaggtgaagctgcgcggcaccaacttcccctccgacggccccgtaatgcagaagaagaccatgggctgggaggcctcctccgagcggatgtaccccgaggacggcgccctgaagggcgagatcaagcagaggctgaagctgaaggacggcggccactacgacgctgaggtcaagaccacctacaaggccaagaagcccgtgcagctgcccggcgcctacaacgtcaacatcaagttggacatcacctcccacaacgaggactacaccatcgtggaacagtacgaacgcgccgagggccgccactccaccggcggcatggacgagctgtacaagtaa

SEQ ID NO: 1941 - protein, 8 aa, synthetic construct
  REGION 1..8: note = Description of Artificial Sequence: Synthetic FLAG sequence
DYKDDDDK

SEQ ID NO: 1942 - skipped

SEQ ID NO: 1943 - DNA, 558 bp, synthetic construct
  misc_feature 1..558: note = Description of Artificial Sequence: Synthetic destabilizing domain (DD)
  source 1..558: mol_type = other DNA
gttggttcgctaaactgcatcgtcgctgtgtcccagaacatgggcatcggcaagaacggggacctgccctggccaccgctcaggaatgaattcagatatttccagagaatgaccacaacctcttcagtagaaggtaaacagaatctggtgattatgggtaagaagacctggttctccattcctgagaagaatcgacctttaaagggtagaattaatttagttctcagcagagaactcaaggaacctccacaaggagctcattttctttccagaagtctagatgatgccttaaaacttactgaacaaccagaattagcaaataaagtagacatggtctggatagttggtggcagttctgtttataaggaagccatgaatcacccaggccatcttaaactatttgtgacaaggatcatgcaagactttgaaagtgacacgttttttccagaaattgatttggagaaatataaacttctgccagaatacccaggtgttctctctgatgtccaggaggagaaaggcattaagtacaaatttgaagtatatgaggagaatgat

SEQ ID NO: 1944 - DNA, 561 bp, synthetic construct
  misc_feature 1..561: note = Description of Artificial Sequence: Synthetic destabilizing domain (DD)
  source 1..561: mol_type = other DNA
gttggttcgctaaactgcatcgtcgctgtgtcccagaacatgggcatcggcaagaacggggacctgccctggccaccgctcaggaatgaattcagatatttccagagaatgaccacaacctcttcagtagaaggtaaacagaatctggtgattatgggtaagaagacctggttctccattcctgagaagaatcgacctttaaagggtagaattaatttagttctcagcagagaactcaaggaacctccacaaggagctcattttctttccagaagtctagatgatgccttaaaacttactgaacaaccagaattagcaaataaagtagacatggtctggatagttggtggcagttctgtttataaggaagccatgaatcacccaggccatcttaaactatttgtgacaaggatcatgcaagactttgaaagtgacacgttttttccagaaattgatttggagaaatataaacttctgccaggatacccaggtgttctctctgatgtccaggaggagaaaggctttaagtacaaatttgaagtatatgagaagaatgattga

SEQ ID NO: 1945 - DNA, 561 bp, synthetic construct; identical to SEQ ID NO: 1944
  misc_feature 1..561: note = Description of Artificial Sequence: Synthetic destabilizing domain (DD)
  source 1..561: mol_type = other DNA

SEQ ID NO: 1946 - DNA, 558 bp, synthetic construct
  misc_feature 1..558: note = Description of Artificial Sequence: Synthetic destabilizing domain (DD)
  source 1..558: mol_type = other DNA
gttggttcgctaaactgcatcgtcgctgtgtcccagaacatgggcatcggcaagaacggggacctgccctggccaccgctcaggaatgaattcagatatttccagagaatgaccacaacctcttcagtagaaggtaaacagaatctggtgattatgggtaagaagacctggttctccattcctgagaagaatcgacctttaaagggtagaattaatttagttctcagcagagaactcaaggaacctccacaaggagctcattttctttccagaagtctagatgatgccttaaaacttactgaacaaccagaattagcaaataaagtagacatggtctggatagttggtggcagttctgtttataaggaagccatgtatcacccaggccatcttaaactatttgtgacaaggatcatgcaagactttgaaagtgacacgttttttccagaaattgatttggagaaatataaacttctgccagaatacccaggtgttctctctgatgtccaggaggagaaaggcattaagtacaaatttgaagtatatgagaagaatgat

SEQ ID NO: 1947 - DNA, 558 bp, synthetic construct; identical to SEQ ID NO: 126
  misc_feature 1..558: note = Description of Artificial Sequence: Synthetic destabilizing domain (DD)
  source 1..558: mol_type = other DNA

SEQ ID NO: 1948 - DNA, 558 bp, synthetic construct
  misc_feature 1..558: note = Description of Artificial Sequence: Synthetic destabilizing domain (DD)
  source 1..558: mol_type = other DNA
gttggttcgctaaactgcatcgtcgctgtgtcccagaacatgggcatcggcaagaacggggacctgccctggccaccgctcaggaatgaattcagatatttccagagaatgaccacaacctcttcagtagaaggtaaacagaatctggtgattatgggtaagaagacctggttctccattcctgagaagaatcgacctttaaagggtagaattaatttagttctcagcagagaactcaaggaacctccacaaggagctcattttctttccagaagtctagatgatgccttaaaacttactgaacaaccagaattagcaaataaagtagacatggtctggatagttggtggcagttctgtttataaggaagccatgaatcacccaggcagacttaaactatttgtgacaaggatcatgcaagactttggaagtgacacgttttttccagaaattgatttggagaaatataaacttctgccagaatacccaggtgttctctctgatgtccaggaggagaaaggcattaagtacaaatttgaagtatatgagaagaatgat

SEQ ID NO: 1949 - protein, 555 aa, synthetic construct
  REGION 1..555: note = Description of Artificial Sequence: Synthetic construct
MDWTWILFLVAAATRVHSNWVNVISDLKKIEDLIQSMHIDATLYTESDVHPSCKVTAMKCFLLELQVISLESGDASIHDTVENLIILANNSLSSNGNVTESGCKECEELEEKNIKEFLQSFVHIVQMFINTSSGGGSGGGGSGGGGSGGGGSGGGSLQITCPPPMSVEHADIWVKSYSLYSRERYICNSGFKRKAGTSSLTECVLNKATNVAHWTTPSLKCIRDPALVHQRPAPPSTVTTAGVTPQPESLSPSGKEPAASSPSSNNTAATTAAIVPGSQLMPSKSPSTGTTEISSHESSHGTPSQTTAKNWELTASASHQPPGVYPQGHSDTTVAISTSTVLLCGLSAVSLLACYLKSRQTPPLASVEMEAMEALPVTWGTSSRDEDLENCSHHLSGISLIAALAVDHVIGMENAMPWNLPADLAWFKRNTLNKPVIMGRHTWESIGRPLPGRKNIILSSQPGTDDRVTWVKSVDEAIAACGDVPEIMVIGGGRVYEQFLPKAQKLYLTHIDAEVEGDTHFPDYKPDDWESVFSEFHDADAQNSHSYCFEILERR

SEQ ID NO: 1950 - DNA, 1608 bp, synthetic construct
  misc_feature 1..1608: note = Description of Artificial Sequence: Synthetic polynucleotide
  source 1..1608: mol_type = other DNA
gtgaacgtgatctccgacctgaaaaagatcgaggatttgatccagagcatgcacattgacgccaccctgtataccgagtccgacgtgcacccgagttgcaaggtgactgccatgaagtgcttcctgctggagctgcaagtgatcagcctggagagcggcgacgccagcatccacgacaccgtggaaaaccttatcattctggccaacaatagcctgagcagcaacggcaacgtgaccgaaagcggatgtaaggaatgcgaggaactggaagagaagaatatcaaagaattcctgcaaagcttcgtgcacatcgtgcagatgttcatcaacacttcttcaggtggcggtagtggtgggggaggatctggaggcggaggaagcgggggtggaggttcaggaggagggagcttgcaaattacctgcccccctccgatgagcgtggagcacgccgacatctgggtcaagagctacagcttgtatagtagggagcggtacatctgtaacagcgggttcaagaggaaggccgggaccagctcactgaccgagtgcgtgttgaacaaggccaccaacgtggcccactggaccacccctagccttaagtgcatcagggacccagcgctcgtacaccagagacccgcgcctccctctacggtaaccacggcaggcgtaaccccccagcccgagagcctgtccccgagcggcaaggagcctgcagcgagcagcccctcaagcaacaacacagccgctaccaccgcggcaatcgtgcccggcagccagctgatgccctcaaagagccccagcaccggcaccactgagataagcagccacgagagctcacacggcactccctcacagaccactgccaagaattgggagctgaccgcctctgccagccaccagcccccaggcgtgtatccccagggccacagcgacaccacggtcgccatcagcacatctacagtgcttttgtgcggccttagcgccgtgtcactgctggcatgctacttgaaaagtaggcaaactccccctcttgccagtgtggaaatggaggccatggaagccctgcccgtgacctggggcaccagttctagggacgaggaccttgagaactgctcacatcatttgagcggcatctctctgattgcggcgctggcagttgaccacgttattggcatggaaaacgcgatgccatggaacctcccggctgacctggcgtggttcaaacgtaacaccctgaacaaacctgtgatcatgggtcgtcacacctgggaatctattggccgtcctctcccgggtcgtaaaaacatcattctgtcttctcagccaggcaccgacgaccgtgttacctgggttaaaagcgttgacgaagcgattgctgcgtgcggtgatgttcctgaaattatggtgatcggcggtggccgtgtttacgaacagttcctgccgaaagcgcagaaactgtacctgacccacatcgacgcggaagttgaaggtgacacccacttcccggactacaaaccggatgattgggagagcgtattctccgaattccatgatgcggatgcgcaaaactctcattcttactgttttgaaatcctggaacgtcgttga

SEQ ID NO: 1951 - protein, 504 aa, synthetic construct
  REGION 1..504: note = Description of Artificial Sequence: Synthetic construct
MDWTWILFLVAAATRVHSNWVNVISDLKKIEDLIQSMHIDATLYTESDVHPSCKVTAMKCFLLELQVISLESGDASIHDTVENLIILANNSLSSNGNVTESGCKECEELEEKNIKEFLQSFVHIVQMFINTSSGGGSGGGGSGGGGSGGGGSGGGSLQITCPPPMSVEHADIWVKSYSLYSRERYICNSGFKRKAGTSSLTECVLNKATNVAHWTTPSLKCIRDPALVHQRPAPPSTVTTAGVTPQPESLSPSGKEPAASSPSSNNTAATTAAIVPGSQLMPSKSPSTGTTEISSHESSHGTPSQTTAKNWELTASASHQPPGVYPQGHSDTTVAISTSTVLLCGLSAVSLLACYLKSRQTPPLASVEMEAMEALPVTWGTSSRDEDLENCSHHLSGGVQVETISPGDGRTFPKRGQTCVVHYTGMLGDGKKVDSSRDRNKPFKFMLGKQEVIRGWEEGVAQMSVGQGAKLTISPDYAYGATGHPGIIPPHATLVFDVELLELE

SEQ ID NO: 1952 - DNA, 1515 bp, synthetic construct
  misc_feature 1..1515: note = Description of Artificial Sequence: Synthetic polynucleotide
  source 1..1515: mol_type = other DNA
atggactggacatggatactcttcctggtagcagccgccacacgagtgcacagcaactgggtgaacgtgatctccgacctgaaaaagatcgaggatttgatccagagcatgcacattgacgccaccctgtataccgagtccgacgtgcacccgagttgcaaggtgactgccatgaagtgcttcctgctggagctgcaagtgatcagcctggagagcggcgacgccagcatccacgacaccgtggaaaaccttatcattctggccaacaatagcctgagcagcaacggcaacgtgaccgaaagcggatgtaaggaatgcgaggaactggaagagaagaatatcaaagaattcctgcaaagcttcgtgcacatcgtgcagatgttcatcaacacttcttcaggtggcggtagtggtgggggaggatctggaggcggaggaagcgggggtggaggttcaggaggagggagcttgcaaattacctgcccccctccgatgagcgtggagcacgccgacatctgggtcaagagctacagcttgtatagtagggagcggtacatctgtaacagcgggttcaagaggaaggccgggaccagctcactgaccgagtgcgtgttgaacaaggccaccaacgtggcccactggaccacccctagccttaagtgcatcagggacccagcgctcgtacaccagagacccgcgcctccctctacggtaaccacggcaggcgtaaccccccagcccgagagcctgtccccgagcggcaaggagcctgcagcgagcagcccctcaagcaacaacacagccgctaccaccgcggcaatcgtgcccggcagccagctgatgccctcaaagagccccagcaccggcaccactgagataagcagccacgagagctcacacggcactccctcacagaccactgccaagaattgggagctgaccgcctctgccagccaccagcccccaggcgtgtatccccagggccacagcgacaccacggtcgccatcagcacatctacagtgcttttgtgcggccttagcgccgtgtcactgctggcatgctacttgaaaagtaggcaaactccccctcttgccagtgtggaaatggaggccatggaagccctgcccgtgacctggggcaccagttctagggacgaggaccttgagaactgctcacatcatttgagcggcggcgtgcaggttgagactataagcccaggcgacggcaggaccttccccaagaggggccagacatgcgtggtgcactacaccggcatgcttggcgacggcaaaaaggtggactcaagcagggacaggaacaagcccttcaagttcatgttgggcaaacaggaggtgatcagaggctgggaggagggtgttgcccagatgagcgtggggcagggcgccaagctcacgataagtcccgattacgcctacggcgccaccggtcaccccggcatcatccccccacacgccaccctggtgttcgacgtggaattgctggagctggagtga

SEQ ID NO: 1953 - protein, 395 aa, synthetic construct [sequence omitted]

SEQ ID NO: 1954 - DNA, 1188 bp, synthetic construct; identical to SEQ ID NO: 169
  misc_feature 1..1188: note = Description of Artificial Sequence: Synthetic polynucleotide
  source 1..1188: mol_type = other DNA

SEQ ID NO: 1955 - protein, 555 aa, synthetic construct
  REGION 1..555: note = Description of Artificial Sequence: Synthetic construct
MDWTWILFLVAAATRVHSNWVNVISDLKKIEDLIQSMHIDATLYTESDVHPSCKVTAMKCFLLELQVISLESGDASIHDTVENLIILANNSLSSNGNVTESGCKECEELEEKNIKEFLQSFVHIVQMFINTSSGGGSGGGGSGGGGSGGGGSGGGSLQITCPPPMSVEHADIWVKSYSLYSRERYICNSGFKRKAGTSSLTECVLNKATNVAHWTTPSLKCIRDPALVHQRPAPPSTVTTAGVTPQPESLSPSGKEPAASSPSSNNTAATTAAIVPGSQLMPSKSPSTGTTEISSHESSHGTPSQTTAKNWELTASASHQPPGVYPQGHSDTTVAISTSTVLLCGLSAVSLLACYLKSRQTPPLASVEMEAMEALPVTWGTSSRDEDLENCSHHLSGISLIAALAVDYVIGMENAMPWNLPADLAWFKRNTLNKPVIMGRHTWESIGRPLPGRKNIILSSQPGTDDRVTWVKSVDEAIAACGDVPEIMVIGGGRVIEQFLPKAQKLYLTHIDAEVEGDTHFPDYEPDDWESVFSEFHDADAQNSHSYCFEILERR

SEQ ID NO: 1956 - DNA, 1668 bp, synthetic construct
  misc_feature 1..1668: note = Description of Artificial Sequence: Synthetic polynucleotide
  source 1..1668: mol_type = other DNA
atggactggacatggatactcttcctggtagcagccgccacacgagtgcacagcaactgggtgaacgtgatctccgacctgaaaaagatcgaggatttgatccagagcatgcacattgacgccaccctgtataccgagtccgacgtgcacccgagttgcaaggtgactgccatgaagtgcttcctgctggagctgcaagtgatcagcctggagagcggcgacgccagcatccacgacaccgtggaaaaccttatcattctggccaacaatagcctgagcagcaacggcaacgtgaccgaaagcggatgtaaggaatgcgaggaactggaagagaagaatatcaaagaattcctgcaaagcttcgtgcacatcgtgcagatgttcatcaacacttcttcaggtggcggtagtggtgggggaggatctggaggcggaggaagcgggggtggaggttcaggaggagggagcttgcaaattacctgcccccctccgatgagcgtggagcacgccgacatctgggtcaagagctacagcttgtatagtagggagcggtacatctgtaacagcgggttcaagaggaaggccgggaccagctcactgaccgagtgcgtgttgaacaaggccaccaacgtggcccactggaccacccctagccttaagtgcatcagggacccagcgctcgtacaccagagacccgcgcctccctctacggtaaccacggcaggcgtaaccccccagcccgagagcctgtccccgagcggcaaggagcctgcagcgagcagcccctcaagcaacaacacagccgctaccaccgcggcaatcgtgcccggcagccagctgatgccctcaaagagccccagcaccggcaccactgagataagcagccacgagagctcacacggcactccctcacagaccactgccaagaattgggagctgaccgcctctgccagccaccagcccccaggcgtgtatccccagggccacagcgacaccacggtcgccatcagcacatctacagtgcttttgtgcggccttagcgccgtgtcactgctggcatgctacttgaaaagtaggcaaactccccctcttgccagtgtggaaatggaggccatggaagccctgcccgtgacctggggcaccagttctagggacgaggaccttgagaactgctcacatcatttgagcggcatctctctgattgcggcgctggcagttgactacgttattggcatggaaaacgcgatgccatggaacctcccggctgacctggcgtggttcaaacgtaacaccctgaacaaacctgtgatcatgggtcgtcacacctgggaatctattggccgtcctctcccgggtcgtaaaaacatcattctgtcttctcagccaggcaccgacgaccgtgttacctgggttaaaagcgttgacgaagcgattgctgcgtgcggtgatgttcctgaaattatggtgatcggcggtggccgtgttatcgaacagttcctgccgaaagcgcagaaactgtacctgacccacatcgacgcggaagttgaaggtgacacccacttcccggactacgaaccggatgattgggagagcgtattctccgaattccatgatgcggatgcgcaaaactctcattcttactgttttgaaatcctggaacgtcgttga

SEQ ID NO: 1957 - protein, 583 aa, synthetic construct
  REGION 1..583: note = Description of Artificial Sequence: Synthetic construct
MDWTWILFLVAAATRVHSNWVNVISDLKKIEDLIQSMHIDATLYTESDVHPSCKVTAMKCFLLELQVISLESGDASIHDTVENLIILANNSLSSNGNVTESGCKECEELEEKNIKEFLQSFVHIVQMFINTSSGGGSGGGGSGGGGSGGGGSGGGSLQITCPPPMSVEHADIWVKSYSLYSRERYICNSGFKRKAGTSSLTECVLNKATNVAHWTTPSLKCIRDPALVHQRPAPPSTVTTAGVTPQPESLSPSGKEPAASSPSSNNTAATTAAIVPGSQLMPSKSPSTGTTEISSHESSHGTPSQTTAKNWELTASASHQPPGVYPQGHSDTTVAISTSTVLLCGLSAVSLLACYLKSRQTPPLASVEMEAMEALPVTWGTSSRDEDLENCSHHLSGVGSLNCIVAVSQNMGIGKNGDLPWPPLRNEFRYFQRMTTTSSVEGKQNLVIMGKKTWFSIPEKNRPLKGRINLVLSRELKEPPQGAHFLSRSLDDALKLTEQPELANKVDMVWIVGGSSVIKEFMNHPGHLKLFVTRIMQDFESDTFFPEIDLEKYKLLPEYPGVLSDVQEEKGIKYKFEVYEKND

SEQ ID NO: 1958 - DNA, 1752 bp, synthetic construct; identical to SEQ ID NO: 170
  misc_feature 1..1752: note = Description of Artificial Sequence: Synthetic polynucleotide
  source 1..1752: mol_type = other DNA

SEQ ID NO: 1959 - protein, 583 aa, synthetic construct
  REGION 1..583: note = Description of Artificial Sequence: Synthetic construct
MDWTWILFLVAAATRVHSNWVNVISDLKKIEDLIQSMHIDATLYTESDVHPSCKVTAMKCFLLELQVISLESGDASIHDTVENLIILANNSLSSNGNVTESGCKECEELEEKNIKEFLQSFVHIVQMFINTSSGGGSGGGGSGGGGSGGGGSGGGSLQITCPPPMSVEHADIWVKSYSLYSRERYICNSGFKRKAGTSSLTECVLNKATNVAHWTTPSLKCIRDPALVHQRPAPPSTVTTAGVTPQPESLSPSGKEPAASSPSSNNTAATTAAIVPGSQLMPSKSPSTGTTEISSHESSHGTPSQTTAKNWELTASASHQPPGVYPQGHSDTTVAISTSTVLLCGLSAVSLLACYLKSRQTPPLASVEMEAMEALPVTWGTSSRDEDLENCSHHLSGVGSLNCIVAVSQNMGIGKNGDLPWPPLRNEFRYFFRMTTTSSVEGKQNLVIMGKKTWFSIPEKFRPLKGRINLVLSRELKEPPQGAHFLSRSLDDALKLTEQPELANKVDMVWIVGGSSVIKEAMNHPGHLKLFVTRIMQDFESDTFFPEIDLEKYKLLPEYPGVLSDVQEEKGIKYKFEVYEKND

SEQ ID NO: 1960 - DNA, 1752 bp, synthetic construct; identical to SEQ ID NO: 171
  misc_feature 1..1752: note = Description of Artificial Sequence: Synthetic polynucleotide
  source 1..1752: mol_type = other DNA

SEQ ID NO: 1961 - protein, 583 aa, synthetic construct
  REGION 1..583: note = Description of Artificial Sequence: Synthetic construct
MDWTWILFLVAAATRVHSNWVNVISDLKKIEDLIQSMHIDATLYTESDVHPSCKVTAMKCFLLELQVISLESGDASIHDTVENLIILANNSLSSNGNVTESGCKECEELEEKNIKEFLQSFVHIVQMFINTSSGGGSGGGGSGGGGSGGGGSGGGSLQITCPPPMSVEHADIWVKSYSLYSRERYICNSGFKRKAGTSSLTECVLNKATNVAHWTTPSLKCIRDPALVHQRPAPPSTVTTAGVTPQPESLSPSGKEPAASSPSSNNTAATTAAIVPGSQLMPSKSPSTGTTEISSHESSHGTPSQTTAKNWELTASASHQPPGVYPQGHSDTTVAISTSTVLLCGLSAVSLLACYLKSRQTPPLASVEMEAMEALPVTWGTSSRDEDLENCSHHLSGVGSLNCIVAVSQNMGIGKNGDLPWPPLRNEFRYFQRMTTTSSVEGKQNLVIMGKKTWFSIPEKNRPLKGRINLVLSRELKEPPQGAHFLSRSLDDALKLTEQPELANKVDMVWIVGGSSVYKEAMNHPGHLKLFVTRIMQDFESDTFFPEIDLEKYKLLPEYPGVLSDVQEEKGIKYKFEVYEEND

SEQ ID NO: 1962 - DNA, 1752 bp, synthetic construct
  misc_feature 1..1752: note = Description of Artificial Sequence: Synthetic construct
  source 1..1752: mol_type = other DNA
atggactggacatggatactcttcctggtagcagccgccacacgagtgcacagcaactgggtgaacgtgatctccgacctgaaaaagatcgaggatttgatccagagcatgcacattgacgccaccctgtataccgagtccgacgtgcacccgagttgcaaggtgactgccatgaagtgcttcctgctggagctgcaagtgatcagcctggagagcggcgacgccagcatccacgacaccgtggaaaaccttatcattctggccaacaatagcctgagcagcaacggcaacgtgaccgaaagcggatgtaaggaatgcgaggaactggaagagaagaatatcaaagaattcctgcaaagcttcgtgcacatcgtgcagatgttcatcaacacttcttcaggtggcggtagtggtgggggaggatctggaggcggaggaagcgggggtggaggttcaggaggagggagcttgcaaattacctgcccccctccgatgagcgtggagcacgccgacatctgggtcaagagctacagcttgtatagtagggagcggtacatctgtaacagcgggttcaagaggaaggccgggaccagctcactgaccgagtgcgtgttgaacaaggccaccaacgtggcccactggaccacccctagccttaagtgcatcagggacccagcgctcgtacaccagagacccgcgcctccctctacggtaaccacggcaggcgtaaccccccagcccgagagcctgtccccgagcggcaaggagcctgcagcgagcagcccctcaagcaacaacacagccgctaccaccgcggcaatcgtgcccggcagccagctgatgccctcaaagagccccagcaccggcaccactgagataagcagccacgagagctcacacggcactccctcacagaccactgccaagaattgggagctgaccgcctctgccagccaccagcccccaggcgtgtatccccagggccacagcgacaccacggtcgccatcagcacatctacagtgcttttgtgcggccttagcgccgtgtcactgctggcatgctacttgaaaagtaggcaaactccccctcttgccagtgtggaaatggaggccatggaagccctgcccgtgacctggggcaccagttctagggacgaggaccttgagaactgctcacatcatttgagtggtgttggttcgctaaactgcatcgtcgctgtgtcccagaacatgggcatcggcaagaacggggacctgccctggccaccgctcaggaatgaattcagatatttccagagaatgaccacaacctcttcagtagaaggtaaacagaatctggtgattatgggtaagaagacctggttctccattcctgagaagaatcgacctttaaagggtagaattaatttagttctcagcagagaactcaaggaacctccacaaggagctcattttctttccagaagtctagatgatgccttaaaacttactgaacaaccagaattagcaaataaagtagacatggtctggatagttggtggcagttctgtttataaggaagccatgaatcacccaggccatcttaaactatttgtgacaaggatcatgcaagactttgaaagtgacacgttttttccagaaattgatttggagaaatataaacttctgccagaatacccaggtgttctctctgatgtccaggaggagaaaggcattaagtacaaatttgaagtatatgaggagaatgattga

SEQ ID NO: 1963 - protein, 583 aa, synthetic construct
  REGION 1..583: note = Description of Artificial Sequence: Synthetic construct
MDWTWILFLVAAATRVHSNWVNVISDLKKIEDLIQSMHIDATLYTESDVHPSCKVTAMKCFLLELQVISLESGDASIHDTVENLIILANNSLSSNGNVTESGCKECEELEEKNIKEFLQSFVHIVQMFINTSSGGGSGGGGSGGGGSGGGGSGGGSLQITCPPPMSVEHADIWVKSYSLYSRERYICNSGFKRKAGTSSLTECVLNKATNVAHWTTPSLKCIRDPALVHQRPAPPSTVTTAGVTPQPESLSPSGKEPAASSPSSNNTAATTAAIVPGSQLMPSKSPSTGTTEISSHESSHGTPSQTTAKNWELTASASHQPPGVYPQGHSDTTVAISTSTVLLCGLSAVSLLACYLKSRQTPPLASVEMEAMEALPVTWGTSSRDEDLENCSHHLSGVGSLNCIVAVSQNMGIGKNGDLPWPPLRNEFRYFQRMTTTSSVEGKQNLVIMGKKTWFSIPEKNRPLKGRINLVLSRELKEPPQGAHFLSRSLDDALKLTEQPELANKVDMVWIVGGSSVYKEAMNHPGHLKLFVTRIMQDFESDTFFPEIDLEKYKLLPGYPGVLSDVQEEKGFKYKFEVYEKND

SEQ ID NO: 1964 - DNA, 1752 bp, synthetic construct
  misc_feature 1..1752: note = Description of Artificial Sequence: Synthetic construct
  source 1..1752: mol_type = other DNA
atggactggacatggatactcttcctggtagcagccgccacacgagtgcacagcaactgggtgaacgtgatctccgacctgaaaaagatcgaggatttgatccagagcatgcacattgacgccaccctgtataccgagtccgacgtgcacccgagttgcaaggtgactgccatgaagtgcttcctgctggagctgcaagtgatcagcctggagagcggcgacgccagcatccacgacaccgtggaaaaccttatcattctggccaacaatagcctgagcagcaacggcaacgtgaccgaaagcggatgtaaggaatgcgaggaactggaagagaagaatatcaaagaattcctgcaaagcttcgtgcacatcgtgcagatgttcatcaacacttcttcaggtggcggtagtggtgggggaggatctggaggcggaggaagcgggggtggaggttcaggaggagggagcttgcaaattacctgcccccctccgatgagcgtggagcacgccgacatctgggtcaagagctacagcttgtatagtagggagcggtacatctgtaacagcgggttcaagaggaaggccgggaccagctcactgaccgagtgcgtgttgaacaaggccaccaacgtggcccactggaccacccctagccttaagtgcatcagggacccagcgctcgtacaccagagacccgcgcctccctctacggtaaccacggcaggcgtaaccccccagcccgagagcctgtccccgagcggcaaggagcctgcagcgagcagcccctcaagcaacaacacagccgctaccaccgcggcaatcgtgcccggcagccagctgatgccctcaaagagccccagcaccggcaccactgagataagcagccacgagagctcacacggcactccctcacagaccactgccaagaattgggagctgaccgcctctgccagccaccagcccccaggcgtgtatccccagggccacagcgacaccacggtcgccatcagcacatctacagtgcttttgtgcggccttagcgccgtgtcactgctggcatgctacttgaaaagtaggcaaactccccctcttgccagtgtggaaatggaggccatggaagccctgcccgtgacctggggcaccagttctagggacgaggaccttgagaactgctcacatcatttgagtggtgttggttcgctaaactgcatcgtcgctgtgtcccagaacatgggcatcggcaagaacggggacctgccctggccaccgctcaggaatgaattcagatatttccagagaatgaccacaacctcttcagtagaaggtaaacagaatctggtgattatgggtaagaagacctggttctccattcctgagaagaatcgacctttaaagggtagaattaatttagttctcagcagagaactcaaggaacctccacaaggagctcattttctttccagaagtctagatgatgccttaaaacttactgaacaaccagaattagcaaataaagtagacatggtctggatagttggtggcagttctgtttataaggaagccatgaatcacccaggccatcttaaactatttgtgacaaggatcatgcaagactttgaaagtgacacgttttttccagaaattgatttggagaaatataaacttctgccaggatacccaggtgttctctctgatgtccaggaggagaaaggctttaagtacaaatttgaagtatatgagaagaatgattga

SEQ ID NO: 1965 - protein, 583 aa, synthetic construct
  REGION 1..583: note = Description of Artificial Sequence: Synthetic construct
MDWTWILFLVAAATRVHSNWVNVISDLKKIEDLIQSMHIDATLYTESDVHPSCKVTAMKCFLLELQVISLESGDASIHDTVENLIILANNSLSSNGNVTESGCKECEELEEKNIKEFLQSFVHIVQMFINTSSGGGSGGGGSGGGGSGGGGSGGGSLQITCPPPMSVEHADIWVKSYSLYSRERYICNSGFKRKAGTSSLTECVLNKATNVAHWTTPSLKCIRDPALVHQRPAPPSTVTTAGVTPQPESLSPSGKEPAASSPSSNNTAATTAAIVPGSQLMPSKSPSTGTTEISSHESSHGTPSQTTAKNWELTASASHQPPGVYPQGHSDTTVAISTSTVLLCGLSAVSLLACYLKSRQTPPLASVEMEAMEALPVTWGTSSRDEDLENCSHHLSGVGSLNCIVAVSQNMGIGKNGDLPWPPLRNEFRYFQRMTTTSSVEGKQNLVIMGKKTWFSIPEKNRPLKGRINLVLSRELKEPPQGAHFLSRSLDDALKLTEQPELANKVDMVWIVGGSSVYKEAMYHPGHLKLFVTRIMQDFESDTFFPEIDLEKYKLLPEYPGVLSDVQEEKGIKYKFEVYEKND

SEQ ID NO: 1966 - DNA, 1752 bp, synthetic construct
  misc_feature 1..1752: note = Description of Artificial Sequence: Synthetic construct
  source 1..1752: mol_type = other DNA
atggactggacatggatactcttcctggtagcagccgccacacgagtgcacagcaactgggtgaacgtgatctccgacctgaaaaagatcgaggatttgatccagagcatgcacattgacgccaccctgtataccgagtccgacgtgcacccgagttgcaaggtgactgccatgaagtgcttcctgctggagctgcaagtgatcagcctggagagcggcgacgccagcatccacgacaccgtggaaaaccttatcattctggccaacaatagcctgagcagcaacggcaacgtgaccgaaagcggatgtaaggaatgcgaggaactggaagagaagaatatcaaagaattcctgcaaagcttcgtgcacatcgtgcagatgttcatcaacacttcttcaggtggcggtagtggtgggggaggatctggaggcggaggaagcgggggtggaggttcaggaggagggagcttgcaaattacctgcccccctccgatgagcgtggagcacgccgacatctgggtcaagagctacagcttgtatagtagggagcggtacatctgtaacagcgggttcaagaggaaggccgggaccagctcactgaccgagtgcgtgttgaacaaggccaccaacgtggcccactggaccacccctagccttaagtgcatcagggacccagcgctcgtacaccagagacccgcgcctccctctacggtaaccacggcaggcgtaaccccccagcccgagagcctgtccccgagcggcaaggagcctgcagcgagcagcccctcaagcaacaacacagccgctaccaccgcggcaatcgtgcccggcagccagctgatgccctcaaagagccccagcaccggcaccactgagataagcagccacgagagctcacacggcactccctcacagaccactgccaagaattgggagctgaccgcctctgccagccaccagcccccaggcgtgtatccccagggccacagcgacaccacggtcgccatcagcacatctacagtgcttttgtgcggccttagcgccgtgtcactgctggcatgctacttgaaaagtaggcaaactccccctcttgccagtgtggaaatggaggccatggaagccctgcccgtgacctggggcaccagttctagggacgaggaccttgagaactgctcacatcatttgagtggtgttggttcgctaaactgcatcgtcgctgtgtcccagaacatgggcatcggcaagaacggggacctgccctggccaccgctcaggaatgaattcagatatttccagagaatgaccacaacctcttcagtagaaggtaaacagaatctggtgattatgggtaagaagacctggttctccattcctgagaagaatcgacctttaaagggtagaattaatttagttctcagcagagaactcaaggaacctccacaaggagctcattttctttccagaagtctagatgatgccttaaaacttactgaacaaccagaattagcaaataaagtagacatggtctggatagttggtggcagttctgtttataaggaagccatgtatcacccaggccatcttaaactatttgtgacaaggatcatgcaagactttgaaagtgacacgttttttccagaaattgatttggagaaatataaacttctgccagaatacccaggtgttctctctgatgtccaggaggagaaaggcattaagtacaaatttgaagtatatgagaagaatgattga

SEQ ID NO: 1967 - protein, 404 aa, synthetic construct
  REGION 1..404: note = Description of Artificial Sequence: Synthetic construct
MDWTWILFLVAAATRVHSNWVNVISDLKKIEDLIQSMHIDATLYTESDVHPSCKVTAMKCFLLELQVISLESGDASIHDTVENLIILANNSLSSNGNVTESGCKECEELEEKNIKEFLQSFVHIVQMFINTSSGGGSGGGGSGGGGSGGGGSGGGSLQYPYDVPDYAITCPPPMSVEHADIWVKSYSLYSRERYICNSGFKRKAGTSSLTECVLNKATNVAHWTTPSLKCIRDPALVHQRPAPPSTVTTAGVTPQPESLSPSGKEPAASSPSSNNTAATTAAIVPGSQLMPSKSPSTGTTEISSHESSHGTPSQTTAKNWELTASASHQPPGVYPQGHSDTTVAISTSTVLLCGLSAVSLLACYLKSRQTPPLASVEMEAMEALPVTWGTSSRDEDLENCSHHL

SEQ ID NO: 1968 - DNA, 1215 bp, synthetic construct
  misc_feature 1..1215: note = Description of Artificial Sequence: Synthetic construct
  source 1..1215: mol_type = other DNA
atggactggacatggatactcttcctggtagcagccgccacacgagtgcacagcaactgggtgaacgtgatctccgacctgaaaaagatcgaggatttgatccagagcatgcacattgacgccaccctgtataccgagtccgacgtgcacccgagttgcaaggtgactgccatgaagtgcttcctgctggagctgcaagtgatcagcctggagagcggcgacgccagcatccacgacaccgtggaaaaccttatcattctggccaacaatagcctgagcagcaacggcaacgtgaccgaaagcggatgtaaggaatgcgaggaactggaagagaagaatatcaaagaattcctgcaaagcttcgtgcacatcgtgcagatgttcatcaacacttcttcaggtggcggtagtggtgggggaggatctggaggcggaggaagcgggggtggaggttcaggtggaggcagcttgcaatacccatacgatgttccagattacgctattacctgcccccctccgatgagcgtggagcacgccgacatctgggtcaagagctacagcttgtatagtagggagcggtacatctgtaacagcgggttcaagaggaaggccgggaccagctcactgaccgagtgcgtgttgaacaaggccaccaacgtggcccactggaccacccctagccttaagtgcatcagggacccagcgctcgtacaccagagacccgcgcctccctctacggtaaccacggcaggcgtaaccccccagcccgagagcctgtccccgagcggcaaggagcctgcagcgagcagcccctcaagcaacaacacagccgctaccaccgcggcaatcgtgcccggcagccagctgatgccctcaaagagccccagcaccggcaccactgagataagcagccacgagagctcacacggcactccctcacagaccactgccaagaattgggagctgaccgcctctgccagccaccagcccccaggcgtgtatccccagggccacagcgacaccacggtcgccatcagcacatctacagtgcttttgtgcggccttagcgccgtgtcactgctggcatgctacttgaaaagtaggcaaactccccctcttgccagtgtggaaatggaggccatggaagccctgcccgtgacctggggcaccagttctagggacgaggaccttgagaactgctcacatcatttgtga

SEQ ID NO: 1969 - protein, 403 aa, synthetic construct
  REGION 1..403: note = Description of Artificial Sequence: Synthetic construct
MDWTWILFLVAAATRVHSNWVNVISDLKKIEDLIQSMHIDATLYTESDVHPSCKVTAMKCFLLELQVISLESGDASIHDTVENLIILANNSLSSNGNVTESGCKECEELEEKNIKEFLQSFVHIVQMFINTSSGGGSGGGGSGGGGSGGGGSGGGGSGGGGSGGGSITCPPPMSVEHADIWVKSYSLYSRERYICNSGFKRKAGTSSLTECVLNKATNVAHWTTPSLKCIRDPALVHQRPAPPSTVTTAGVTPQPESLSPSGKEPAASSPSSNNTAATTAAIVPGSQLMPSKSPSTGTTEISSHESSHGTPSQTTAKNWELTASASHQPPGVYPQGHSDTTVAISTSTVLLCGLSAVSLLACYLKSRQTPPLASVEMEAMEALPVTWGTSSRDEDLENCSHHL

SEQ ID NO: 1970 - DNA, 1212 bp, synthetic construct
  misc_feature 1..1212: note = Description of Artificial Sequence: Synthetic construct
  source 1..1212: mol_type = other DNA
atggactggacatggatactcttcctggtagcagccgccacacgagtgcacagcaactgggtgaacgtgatctccgacctgaaaaagatcgaggatttgatccagagcatgcacattgacgccaccctgtataccgagtccgacgtgcacccgagttgcaaggtgactgccatgaagtgcttcctgctggagctgcaagtgatcagcctggagagcggcgacgccagcatccacgacaccgtggaaaaccttatcattctggccaacaatagcctgagcagcaacggcaacgtgaccgaaagcggatgtaaggaatgcgaggaactggaagagaagaatatcaaagaattcctgcaaagcttcgtgcacatcgtgcagatgttcatcaacacttcttctggtggcgggagtggaggaggtgggtccggagggggagggagcggtggtggaggttccggcggggggggtagtggaggcggagggtcaggtgggggcagcattacctgcccccctccgatgagcgtggagcacgccgacatctgggtcaagagctacagcttgtatagtagggagcggtacatctgtaacagcgggttcaagaggaaggccgggaccagctcactgaccgagtgcgtgttgaacaaggccaccaacgtggcccactggaccacccctagccttaagtgcatcagggacccagcgctcgtacaccagagacccgcgcctccctctacggtaaccacggcaggcgtaaccccccagcccgagagcctgtccccgagcggcaaggagcctgcagcgagcagcccctcaagcaacaacacagccgctaccaccgcggcaatcgtgcccggcagccagctgatgccctcaaagagccccagcaccggcaccactgagataagcagccacgagagctcacacggcactccctcacagaccactgccaagaattgggagctgaccgcctctgccagccaccagcccccaggcgtgtatccccagggccacagcgacaccacggtcgccatcagcacatctacagtgcttttgtgcggccttagcgccgtgtcactgctggcatgctacttgaaaagtaggcaaactccccctcttgccagtgtggaaatggaggccatggaagccctgcccgtgacctggggcaccagttctagggacgaggaccttgagaactgctcacatcatttgtga

SEQ ID NO: 1971 - protein, 403 aa, synthetic construct
  REGION 1..403: note = Description of Artificial Sequence: Synthetic construct
MDWTWILFLVAAATRVHSNWVNVISDLKKIEDLIQSMHIDATLYTESDVHPSCKVTAMKCFLLELQVISLESGDASIHDTVENLIILANNSLSSNGNVTESGCKECEELEEKNIKEFLQSFVHIVQMFINTSSGGGSGGGGSGGGGSGGGGSYPYDVPDYASGGGSITCPPPMSVEHADIWVKSYSLYSRERYICNSGFKRKAGTSSLTECVLNKATNVAHWTTPSLKCIRDPALVHQRPAPPSTVTTAGVTPQPESLSPSGKEPAASSPSSNNTAATTAAIVPGSQLMPSKSPSTGTTEISSHESSHGTPSQTTAKNWELTASASHQPPGVYPQGHSDTTVAISTSTVLLCGLSAVSLLACYLKSRQTPPLASVEMEAMEALPVTWGTSSRDEDLENCSHHL

SEQ ID NO: 1972 - DNA, 1212 bp, synthetic construct
  misc_feature 1..1212: note = Description of Artificial Sequence: Synthetic construct
  source 1..1212: mol_type = other DNA
atggactggacatggatactcttcctggtagcagccgccacacgagtgcacagcaactgggtgaacgtgatctccgacctgaaaaagatcgaggatttgatccagagcatgcacattgacgccaccctgtataccgagtccgacgtgcacccgagttgcaaggtgactgccatgaagtgcttcctgctggagctgcaagtgatcagcctggagagcggcgacgccagcatccacgacaccgtggaaaaccttatcattctggccaacaatagcctgagcagcaacggcaacgtgaccgaaagcggatgtaaggaatgcgaggaactggaagagaagaatatcaaagaattcctgcaaagcttcgtgcacatcgtgcagatgttcatcaacacttctagtggtggcgggtccggcggtggtggtagcgggggtggaggctcaggtggcggtggcagttatccttacgatgtgcccgactatgcttcaggcggggggagtattacctgcccccctccgatgagcgtggagcacgccgacatctgggtcaagagctacagcttgtatagtagggagcggtacatctgtaacagcgggttcaagaggaaggccgggaccagctcactgaccgagtgcgtgttgaacaaggccaccaacgtggcccactggaccacccctagccttaagtgcatcagggacccagcgctcgtacaccagagacccgcgcctccctctacggtaaccacggcaggcgtaaccccccagcccgagagcctgtccccgagcggcaaggagcctgcagcgagcagcccctcaagcaacaacacagccgctaccaccgcggcaatcgtgcccggcagccagctgatgccctcaaagagccccagcaccggcaccactgagataagcagccacgagagctcacacggcactccctcacagaccactgccaagaattgggagctgaccgcctctgccagccaccagcccccaggcgtgtatccccagggccacagcgacaccacggtcgccatcagcacatctacagtgcttttgtgcggccttagcgccgtgtcactgctggcatgctacttgaaaagtaggcaaactccccctcttgccagtgtggaaatggaggccatggaagccctgcccgtgacctggggcaccagttctagggacgaggaccttgagaactgctcacatcatttgtga

SEQ ID NO: 1973 - protein, 371 aa, synthetic construct
  REGION 1..371: note = Description of Artificial Sequence: Synthetic construct
MDWTWILFLVAAATRVHSNWVNVISDLKKIEDLIQSMHIDATLYTESDVHPSCKVTAMKCFLLELQVISLESGDASIHDTVENLIILANNSLSSNGNVTESGCKECEELEEKNIKEFLQSFVHIVQMFINTSSGITCPPPMSVEHADIWVKSYSLYSRERYICNSGFKRKAGTSSLTECVLNKATNVAHWTTPSLKCIRDPALVHQRPAPPSTVTTAGVTPQPESLSPSGKEPAASSPSSNNTAATTAAIVPGSQLMPSKSPSTGTTEISSHESSHGTPSQTTAKNWELTASASHQPPGVYPQGHSDTTVAISTSTVLLCGLSAVSLLACYLKSRQTPPLASVEMEAMEALPVTWGTSSRDEDLENCSHHL

SEQ ID NO: 1974 - DNA, 1116 bp, synthetic construct
  misc_feature 1..1116: note = Description of Artificial Sequence: Synthetic construct
  source 1..1116: mol_type = other DNA
atggactggacatggatactcttcctggtagcagccgccacacgagtgcacagcaactgggtgaacgtgatctccgacctgaaaaagatcgaggatttgatccagagcatgcacattgacgccaccctgtataccgagtccgacgtgcacccgagttgcaaggtgactgccatgaagtgcttcctgctggagctgcaagtgatcagcctggagagcggcgacgccagcatccacgacaccgtggaaaaccttatcattctggccaacaatagcctgagcagcaacggcaacgtgaccgaaagcggatgtaaggaatgcgaggaactggaagagaagaatatcaaagaattcctgcaaagcttcgtgcacatcgtgcagatgttcatcaacacttctagtggtattacctgcccccctccgatgagcgtggagcacgccgacatctgggtcaagagctacagcttgtatagtagggagcggtacatctgtaacagcgggttcaagaggaaggccgggaccagctcactgaccgagtgcgtgttgaacaaggccaccaacgtggcccactggaccacccctagccttaagtgcatcagggacccagcgctcgtacaccagagacccgcgcctccctctacggtaaccacggcaggcgtaaccccccagcccgagagcctgtccccgagcggcaaggagcctgcagcgagcagcccctcaagcaacaacacagccgctaccaccgcggcaatcgtgcccggcagccagctgatgccctcaaagagccccagcaccggcaccactgagataagcagccacgagagctcacacggcactccctcacagaccactgccaagaattgggagctgaccgcctctgccagccaccagcccccaggcgtgtatccccagggccacagcgacaccacggtcgccatcagcacatctacagtgcttttgtgcggccttagcgccgtgtcactgctggcatgctacttgaaaagtaggcaaactccccctcttgccagtgtggaaatggaggccatggaagccctgcccgtgacctggggcaccagttctagggacgaggaccttgagaactgctcacatcatttgtga

SEQ ID NO: 1975 - protein, 407 aa, synthetic construct
  REGION 1..407: note = Description of Artificial Sequence: Synthetic construct
MAPRRARGCRTLGLPALLLLLLLRPPATRGNWVNVISDLKKIEDLIQSMHIDATLYTESDVHPSCKVTAMKCFLLELQVISLESGDASIHDTVENLIILANNSLSSNGNVTESGCKECEELEEKNIKEFLQSFVHIVQMFINTSSGGGSGGGGSGGGGSGGGGSGGGSLQITCPPPMSVEHADIWVKSYSLYSRERYICNSGFKRKAGTSSLTECVLNKATNVAHWTTPSLKCIRDPALVHQRPAPPSTVTTAGVTPQPESLSPSGKEPAASSPSSNNTAATTAAIVPGSQLMPSKSPSTGTTEISSHESSHGTPSQTTAKNWELTASASHQPPGVYPQGHSDTTVAISTSTVLLCGLSAVSLLACYLKSRQTPPLASVEMEAMEALPVTWGTSSRDEDLENCSHHL

SEQ ID NO: 1976 - DNA, 1224 bp, synthetic construct
  misc_feature 1..1224: note = Description of Artificial Sequence: Synthetic construct
  source 1..1224: mol_type = other DNA
atggccccgcggcgggcgcgcggctgccggaccctcggtctcccggcgctgctactgctgctgctgctccggccgccggcgacgcggggcaactgggtgaatgtaataagtgatttgaaaaaaattgaagatcttattcaatctatgcatattgatgctactttatatacggaaagtgatgttcaccccagttgcaaagtaacagcaatgaagtgctttctcttggagttacaagttatttcacttgagtccggagatgcaagtattcatgatacagtagaaaatctgatcatcctagcaaacaacagtttgtcttctaatgggaatgtaacagaatctggatgcaaagaatgtgaggaactggaggaaaaaaatattaaagaatttttgcagagttttgtacatattgtccaaatgttcatcaacacttcttccggtggaggtagcggtggagggggttctggtggaggaggttctggaggtggaggttctggcggtgggtccttgcaaatcacgtgccctccccccatgtccgtggaacacgcagacatctgggtcaagagctacagcttgtactccagggagcggtacatttgtaactctggtttcaagcgtaaagccggcacgtccagcctgacggagtgcgtgttgaacaaggccacgaatgtcgcccactggacaacccccagtctcaaatgcattagagaccctgccctggttcaccaaaggccagcgccaccctccacagtaacgacggcaggggtgaccccacagccagagagcctctccccttctggaaaagagcccgcagcttcatctcccagctcaaacaacacagcggccacaacagcagctattgtcccgggctcccagctgatgccttcaaaatcaccttccacaggaaccacagagataagcagtcatgagtcctcccacggcaccccctctcagacaacagccaagaactgggaactcacagcatccgcctcccaccagccgccaggtgtgtatccacagggccacagcgacaccactgtggctatctccacgtccactgtcctgctgtgtgggctgagcgctgtgtctctcctggcatgctacctcaagtcaaggcaaactcccccgctggccagcgttgaaatggaagccatggaggctctgccggtgacttgggggaccagcagcagagatgaagacttggaaaactgctctcaccacctatga

SEQ ID NO: 1977 - protein, 397 aa, synthetic construct
  REGION 1..397: note = Description of Artificial Sequence: Synthetic construct
MDWTWILFLVAAATRVHSNWVNVISDLKKIEDLIQSMHIDATLYTESDVHPSCKVTAMKCFLLELQVISLESGDASIHDTVENLIILANNSLSSNGNVTESGCKECEELEEKNIKEFLQSFVHIVQMFINTSSGGGSGGGGSGGGGSGGGGSGGGSLQITCPPPMSVEHADIWVKSYSLYSRERYICNSGFKRKAGTSSLTECVLNKATNVAHWTTPSLKCIRDPALVHQRPAPPSTVTTAGVTPQPESLSPSGKEPAASSPSSNNTAATTAAIVPGSQLMPSKSPSTGTTEISSHESSHGTPSQTTAKNWELTASASHQPPGVYPQGHSDTTVAISTSTVLLCGLSAVSLLACYLKSRQTPPLASVEMEAMEALPVTWGTSSRDEDLENCSHHLGS

SEQ ID NO: 1978 - DNA, 1194 bp, synthetic construct
  misc_feature 1..1194: note = Description of Artificial Sequence: Synthetic construct
  source 1..1194: mol_type = other DNA
atggactggacatggatactcttcctggtagcagccgccacacgagtgcacagcaactgggtgaacgtgatctccgacctgaaaaagatcgaggatttgatccagagcatgcacattgacgccaccctgtataccgagtccgacgtgcacccgagttgcaaggtgactgccatgaagtgcttcctgctggagctgcaagtgatcagcctggagagcggcgacgccagcatccacgacaccgtggaaaaccttatcattctggccaacaatagcctgagcagcaacggcaacgtgaccgaaagcggatgtaaggaatgcgaggaactggaagagaagaatatcaaagaattcctgcaaagcttcgtgcacatcgtgcagatgttcatcaacacttcttcaggtggcggtagtggtgggggaggatctggaggcggaggaagcgggggtggaggttcaggaggagggagcttgcaaattacctgcccccctccgatgagcgtggagcacgccgacatctgggtcaagagctacagcttgtatagtagggagcggtacatctgtaacagcgggttcaagaggaaggccgggaccagctcactgaccgagtgcgtgttgaacaaggccaccaacgtggcccactggaccacccctagccttaagtgcatcagggacccagcgctcgtacaccagagacccgcgcctccctctacggtaaccacggcaggcgtaaccccccagcccgagagcctgtccccgagcggcaaggagcctgcagcgagcagcccctcaagcaacaacacagccgctaccaccgcggcaatcgtgcccggcagccagctgatgccctcaaagagccccagcaccggcaccactgagataagcagccacgagagctcacacggcactccctcacagaccactgccaagaattgggagctgaccgcctctgccagccaccagcccccaggcgtgtatccccagggccacagcgacaccacggtcgccatcagcacatctacagtgcttttgtgcggccttagcgccgtgtcactgctggcatgctacttgaaaagtaggcaaactccccctcttgccagtgtggaaatggaggccatggaagccctgcccgtgacctggggcaccagttctagggacgaggaccttgagaactgctcacatcatttgggatcctga

SEQ ID NO: 1979 - protein, 555 aa, synthetic construct; identical to SEQ ID NO: 1955
  REGION 1..555: note = Description of Artificial Sequence: Synthetic construct

SEQ ID NO: 1980 - DNA, 1668 bp, synthetic construct
  misc_feature 1..1668: note = Description of Artificial Sequence: Synthetic construct
  source 1..1668: mol_type = other DNA
atggactggacctggattctgtttctggtggccgctgccacaagagtgcacagcaattgggtcaacgtgatcagcgacctgaagaagatcgaggacctgatccagagcatgcacatcgacgccacactgtacaccgagtccgatgtgcaccctagctgcaaagtgaccgccatgaagtgctttctgctggaactgcaagtgatcagcctggaaagcggcgacgccagcatccacgataccgtggaaaatctgatcatcctggccaacaacagcctgagcagcaacggcaatgtgaccgagagcggctgcaaagagtgcgaggaactggaagagaagaacatcaaagagttcctccagagcttcgtccacatcgtgcagatgttcatcaacaccagctctggcggaggaagcggaggcggaggatctggtggtggtggatctggcggcggtggtagtggcggaggttctctgcaaatcacctgtcctccacctatgagcgtggaacacgccgacatctgggtcaagagctacagcctgtacagcagagagcggtacatctgcaacagcggcttcaagagaaaggccggcacaagcagcctgaccgagtgtgtgctgaacaaggccacaaacgtggcccactggaccacacctagcctgaagtgcatcagagatcccgctctggttcaccagaggcctgctcctccatctacagtgacaacagctggcgtgacccctcagcctgagtctctgtctccatctggaaaagagcctgccgccagctctcccagctctaacaatactgctgccaccacagccgccatcgtgcctggatctcagctgatgcctagcaagagccctagcaccggcacaacagagatcagctctcacgagtctagccacggcaccccatctcagaccacagccaagaattgggagctgaccgcctctgcctctcatcagccacctggtgtttaccctcaaggccactctgataccaccgtggccatcagcacaagcacagtgctgctgtgtggactgtctgccgtgtctctgctggcctgctacctgaagtctagacagacacctcctctggccagcgtggaaatggaagccatggaagctctgcctgtgacatggggcaccagcagcagagatgaggacctcgagaattgcagccaccacctgagcggcatctctctgattgcggcgctggcagttgactacgttattggcatggaaaacgcgatgccatggaacctcccggctgacctggcgtggttcaaacgtaacaccctgaacaaacctgtgatcatgggtcgtcacacctgggaatctattggccgtcctctcccgggtcgtaaaaacatcattctgtcttctcagccaggcaccgacgaccgtgttacctgggttaaaagcgttgacgaagcgattgctgcgtgcggtgatgttcctgaaattatggtgatcggcggtggccgtgttatcgaacagttcctgccgaaagcgcagaaactgtacctgacccacatcgacgcggaagttgaaggtgacacccacttcccggactacgaaccggatgattgggagagcgtattctccgaattccatgatgcggatgcgcaaaactctcattcttactgttttgaaatcctggaacgtcgttag

SEQ ID NO: 1981 - protein, 407 aa, synthetic construct; identical to SEQ ID NO: 1975
  REGION 1..407: note = Description of Artificial Sequence: Synthetic construct

SEQ ID NO: 1982 - DNA, 1224 bp, synthetic construct
  misc_feature 1..1224: note = Description of Artificial Sequence: Synthetic construct
  source 1..1224: mol_type = other DNA
atggccccgcggcgggcgcgcggctgccggaccctcggtctcccggcgctgctactgctgctgctgctccggccgccggcgacgcggggcaactgggtgaatgtaataagtgatttgaaaaaaattgaagatcttattcaatctatgcatattgatgctactttatatacggaaagtgatgttcaccccagttgcaaagtaacagcaatgaagtgctttctcttggagttacaagttatttcacttgagtccggagatgcaagtattcatgatacagtagaaaatctgatcatcctagcaaacaacagtttgtcttctaatgggaatgtaacagaatctggatgcaaagaatgtgaggaactggaggaaaaaaatattaaagaatttttgcagagttttgtacatattgtccaaatgttcatcaacacttcttccggggggggtagcgggggagggggttccggcgggggagggtctggagggggaggttccggcggggggtccttgcaaatcacgtgccctccccccatgtccgtggaacacgcagacatctgggtcaagagctacagcttgtactccagggagcggtacatttgtaactctggtttcaagcgtaaagccggcacgtccagcctgacggagtgcgtgttgaacaaggccacgaatgtcgcccactggacaacccccagtctcaaatgcattagagaccctgccctggttcaccaaaggccagcgccaccctccacagtaacgacggcaggggtgaccccacagccagagagcctctccccttctggaaaagagcccgcagcttcatctcccagctcaaacaacacagcggccacaacagcagctattgtcccgggctcccagctgatgccttcaaaatcaccttccacaggaaccacagagataagcagtcatgagtcctcccacggcaccccctctcagacaacagccaagaactgggaactcacagcatccgcctcccaccagccgccaggtgtgtatccacagggccacagcgacaccactgtggctatctccacgtccactgtcctgctgtgtgggctgagcgctgtgtctctcctggcatgctacctcaagtcaaggcaaactcccccgctggccagcgttgaaatggaagccatggaggctctgccggtgacttgggggaccagcagcagagatgaagacttggaaaactgctctcaccacctatga

SEQ ID NO: 1983 - DNA, 1188 bp, synthetic construct; identical to SEQ ID NO: 169
  misc_feature 1..1188: note = Description of Artificial Sequence: Synthetic construct
  source 1..1188: mol_type = other DNA

SEQ ID NO: 1984 - protein, 573 aa, synthetic construct
  REGION 1..573: note = Description of Artificial Sequence: Synthetic construct
MDWTWILFLVAAATRVHSDYKDDDDKNWVNVISDLKKIEDLIQSMHIDATLYTESDVHPSCKVTAMKCFLLELQVISLESGDASIHDTVENLIILANNSLSSNGNVTESGCKECEELEEKNIKEFLQSFVHIVQMFINTSSGGGSGGGGSGGGGSGGGGSGGGSLQYPYDVPDYAITCPPPMSVEHADIWVKSYSLYSRERYICNSGFKRKAGTSSLTECVLNKATNVAHWTTPSLKCIRDPALVHQRPAPPSTVTTAGVTPQPESLSPSGKEPAASSPSSNNTAATTAAIVPGSQLMPSKSPSTGTTEISSHESSHGTPSQTTAKNWELTASASHQPPGVYPQGHSDTTVAISTSTVLLCGLSAVSLLACYLKSRQTPPLASVEMEAMEALPVTWGTSSRDEDLENCSHHLGSGISLIAALAVDYVIGMENAMPWNLPADLAWFKRNTLNKPVIMGRHTWESIGRPLPGRKNIILSSQPGTDDRVTWVKSVDEAIAACGDVPEIMVIGGGRVIEQFLPKAQKLYLTHIDAEVEGDTHFPDYEPDDWESVFSEFHDADAQNSHSYCFEILERR

SEQ ID NO: 1985 - DNA, 1722 bp, synthetic construct
  misc_feature 1..1722: note = Description of Artificial Sequence: Synthetic construct
  source 1..1722: mol_type = other DNA
atggactggacatggatactcttcctggtagcagccgccacacgagtgcacagcgactacaaagacgatgacgacaagaactgggtgaacgtgatctccgacctgaaaaagatcgaggatttgatccagagcatgcacattgacgccaccctgtataccgagtccgacgtgcacccgagttgcaaggtgactgccatgaagtgcttcctgctggagctgcaagtgatcagcctggagagcggcgacgccagcatccacgacaccgtggaaaaccttatcattctggccaacaatagcctgagcagcaacggcaacgtgaccgaaagcggatgtaaggaatgcgaggaactggaagagaagaatatcaaagaattcctgcaaagcttcgtgcacatcgtgcagatgttcatcaacacttcttcaggtggcggtagtggtgggggaggatctggaggcggaggaagcgggggtggaggttcaggtggaggcagcttgcaatacccatacgatgttccagattacgctattacctgcccccctccgatgagcgtggagcacgccgacatctgggtcaagagctacagcttgtatagtagggagcggtacatctgtaacagcgggttcaagaggaaggccgggaccagctcactgaccgagtgcgtgttgaacaaggccaccaacgtggcccactggaccacccctagccttaagtgcatcagggacccagcgctcgtacaccagagacccgcgcctccctctacggtaaccacggcaggcgtaaccccccagcccgagagcctgtccccgagcggcaaggagcctgcagcgagcagcccctcaagcaacaacacagccgctaccaccgcggcaatcgtgcccggcagccagctgatgccctcaaagagccccagcaccggcaccactgagataagcagccacgagagctcacacggcactccctcacagaccactgccaagaattgggagctgaccgcctctgccagccaccagcccccaggcgtgtatccccagggccacagcgacaccacggtcgccatcagcacatctacagtgcttttgtgcggccttagcgccgtgtcactgctggcatgctacttgaaaagtaggcaaactccccctcttgccagtgtggaaatggaggccatggaagccctgcccgtgacctggggcaccagttctagggacgaggaccttgagaactgctcacatcatttgggatccggaatctctctgattgcggcgctggcagttgactacgttattggcatggaaaacgcgatgccatggaacctcccggctgacctggcgtggttcaaacgtaacaccctgaacaaacctgtgatcatgggtcgtcacacctgggaatctattggccgtcctctcccgggtcgtaaaaacatcattctgtcttctcagccaggcaccgacgaccgtgttacctgggttaaaagcgttgacgaagcgattgctgcgtgcggtgatgttcctgaaattatggtgatcggcggtggccgtgttatcgaacagttcctgccgaaagcgcagaaactgtacctgacccacatcgacgcggaagttgaaggtgacacccacttcccggactacgaaccggatgattgggagagcgtattctccgaattccatgatgcggatgcgcaaaactctcattcttactgttttgaaatcctggaacgtcgttga

SEQ ID NO: 1986 - protein, 414 aa, synthetic construct
  REGION 1..414: note = Description of Artificial Sequence: Synthetic construct
MDWTWILFLVAAATRVHSDYKDDDDKNWVNVISDLKKIEDLIQSMHIDATLYTESDVHPSCKVTAMKCFLLELQVISLESGDASIHDTVENLIILANNSLSSNGNVTESGCKECEELEEKNIKEFLQSFVHIVQMFINTSSGGGSGGGGSGGGGSGGGGSGGGSLQYPYDVPDYAITCPPPMSVEHADIWVKSYSLYSRERYICNSGFKRKAGTSSLTECVLNKATNVAHWTTPSLKCIRDPALVHQRPAPPSTVTTAGVTPQPESLSPSGKEPAASSPSSNNTAATTAAIVPGSQLMPSKSPSTGTTEISSHESSHGTPSQTTAKNWELTASASHQPPGVYPQGHSDTTVAISTSTVLLCGLSAVSLLACYLKSRQTPPLASVEMEAMEALPVTWGTSSRDEDLENCSHHLGS

SEQ ID NO: 1987 - DNA, 1245 bp, synthetic construct
  misc_feature 1..1245: note = Description of Artificial Sequence: Synthetic construct
  source 1..1245: mol_type = other DNA
atggactggacatggatactcttcctggtagcagccgccacacgagtgcacagcgactacaaagacgatgacgacaagaactgggtgaacgtgatctccgacctgaaaaagatcgaggatttgatccagagcatgcacattgacgccaccctgtataccgagtccgacgtgcacccgagttgcaaggtgactgccatgaagtgcttcctgctggagctgcaagtgatcagcctggagagcggcgacgccagcatccacgacaccgtggaaaaccttatcattctggccaacaatagcctgagcagcaacggcaacgtgaccgaaagcggatgtaaggaatgcgaggaactggaagagaagaatatcaaagaattcctgcaaagcttcgtgcacatcgtgcagatgttcatcaacacttcttcaggtggcggtagtggtgggggaggatctggaggcggaggaagcgggggtggaggttcaggtggaggcagcttgcaatacccatacgatgttccagattacgctattacctgcccccctccgatgagcgtggagcacgccgacatctgggtcaagagctacagcttgtatagtagggagcggtacatctgtaacagcgggttcaagaggaaggccgggaccagctcactgaccgagtgcgtgttgaacaaggccaccaacgtggcccactggaccacccctagccttaagtgcatcagggacccagcgctcgtacaccagagacccgcgcctccctctacggtaaccacggcaggcgtaaccccccagcccgagagcctgtccccgagcggcaaggagcctgcagcgagcagcccctcaagcaacaacacagccgctaccaccgcggcaatcgtgcccggcagccagctgatgccctcaaagagccccagcaccggcaccactgagataagcagccacgagagctcacacggcactccctcacagaccactgccaagaattgggagctgaccgcctctgccagccaccagcccccaggcgtgtatccccagggccacagcgacaccacggtcgccatcagcacatctacagtgcttttgtgcggccttagcgccgtgtcactgctggcatgctacttgaaaagtaggcaaactccccctcttgccagtgtggaaatggaggccatggaagccctgcccgtgacctggggcaccagttctagggacgaggaccttgagaactgctcacatcatttgggatcctga

SEQ ID NO: 1988 - protein, 601 aa, synthetic construct
  REGION 1..601: note = Description of Artificial Sequence: Synthetic construct
MDWTWILFLVAAATRVHSDYKDDDDKNWVNVISDLKKIEDLIQSMHIDATLYTESDVHPSCKVTAMKCFLLELQVISLESGDASIHDTVENLIILANNSLSSNGNVTESGCKECEELEEKNIKEFLQSFVHIVQMFINTSSGGGSGGGGSGGGGSGGGGSGGGSLQYPYDVPDYAITCPPPMSVEHADIWVKSYSLYSRERYICNSGFKRKAGTSSLTECVLNKATNVAHWTTPSLKCIRDPALVHQRPAPPSTVTTAGVTPQPESLSPSGKEPAASSPSSNNTAATTAAIVPGSQLMPSKSPSTGTTEISSHESSHGTPSQTTAKNWELTASASHQPPGVYPQGHSDTTVAISTSTVLLCGLSAVSLLACYLKSRQTPPLASVEMEAMEALPVTWGTSSRDEDLENCSHHLGSGVGSLNCIVAVSQNMGIGKNGDLPWPPLRNEFRYFQRMTTTSSVEGKQNLVIMGKKTWFSIPEKNRPLKGRINLVLSRELKEPPQGAHFLSRSLDDALKLTEQPELANKVDMVWIVGGSSVYKEAMNHPGHLKLFVTRIMQDFESDTFFPEIDLEKYKLLPEYPGVLSDVQEEKGIKYKFEVYEEND

SEQ ID NO: 1989 - DNA, 1806 bp, synthetic construct
  misc_feature 1..1806: note = Description of Artificial Sequence: Synthetic construct
  source 1..1806: mol_type = other DNA
atggactggacatggatactcttcctggtagcagccgccacacgagtgcacagcgactacaaagacgatgacgacaagaactgggtgaacgtgatctccgacctgaaaaagatcgaggatttgatccagagcatgcacattgacgccaccctgtataccgagtccgacgtgcacccgagttgcaaggtgactgccatgaagtgcttcctgctggagctgcaagtgatcagcctggagagcggcgacgccagcatccacgacaccgtggaaaaccttatcattctggccaacaatagcctgagcagcaacggcaacgtgaccgaaagcggatgtaaggaatgcgaggaactggaagagaagaatatcaaagaattcctgcaaagcttcgtgcacatcgtgcagatgttcatcaacacttcttcaggtggcggtagtggtgggggaggatctggaggcggaggaagcgggggtggaggttcaggtggaggcagcttgcaatacccatacgatgttccagattacgctattacctgcccccctccgatgagcgtggagcacgccgacatctgggtcaagagctacagcttgtatagtagggagcggtacatctgtaacagcgggttcaagaggaaggccgggaccagctcactgaccgagtgcgtgttgaacaaggccaccaacgtggcccactggaccacccctagccttaagtgcatcagggacccagcgctcgtacaccagagacccgcgcctccctctacggtaaccacggcaggcgtaaccccccagcccgagagcctgtccccgagcggcaaggagcctgcagcgagcagcccctcaagcaacaacacagccgctaccaccgcggcaatcgtgcccggcagccagctgatgccctcaaagagccccagcaccggcaccactgagataagcagccacgagagctcacacggcactccctcacagaccactgccaagaattgggagctgaccgcctctgccagccaccagcccccaggcgtgtatccccagggccacagcgacaccacggtcgccatcagcacatctacagtgcttttgtgcggccttagcgccgtgtcactgctggcatgctacttgaaaagtaggcaaactccccctcttgccagtgtggaaatggaggccatggaagccctgcccgtgacctggggcaccagttctagggacgaggaccttgagaactgctcacatcatttgggatccggtgttggttcgctaaactgcatcgtcgctgtgtcccagaacatgggcatcggcaagaacggggacctgccctggccaccgctcaggaatgaattcagatatttccagagaatgaccacaacctcttcagtagaaggtaaacagaatctggtgattatgggtaagaagacctggttctccattcctgagaagaatcgacctttaaagggtagaattaatttagttctcagcagagaactcaaggaacctccacaaggagctcattttctttccagaagtctagatgatgccttaaaacttactgaacaaccagaattagcaaataaagtagacatggtctggatagttggtggcagttctgtttataaggaagccatgaatcacccaggccatcttaaactatttgtgacaaggatcatgcaagactttgaaagtgacacgttttttccagaaattgatttggagaaatataaacttctgccagaatacccaggtgttctctctgatgtccaggaggagaaaggcattaagtacaaatttgaagtatatgaggagaatgattga

SEQ ID NO: 1990 - protein, 601 aa, synthetic construct
  REGION 1..601: note = Description of Artificial Sequence: Synthetic construct
MDWTWILFLVAAATRVHSDYKDDDDKNWVNVISDLKKIEDLIQSMHIDATLYTESDVHPSCKVTAMKCFLLELQVISLESGDASIHDTVENLIILANNSLSSNGNVTESGCKECEELEEKNIKEFLQSFVHIVQMFINTSSGGGSGGGGSGGGGSGGGGSGGGSLQYPYDVPDYAITCPPPMSVEHADIWVKSYSLYSRERYICNSGFKRKAGTSSLTECVLNKATNVAHWTTPSLKCIRDPALVHQRPAPPSTVTTAGVTPQPESLSPSGKEPAASSPSSNNTAATTAAIVPGSQLMPSKSPSTGTTEISSHESSHGTPSQTTAKNWELTASASHQPPGVYPQGHSDTTVAISTSTVLLCGLSAVSLLACYLKSRQTPPLASVEMEAMEALPVTWGTSSRDEDLENCSHHLGSGVGSLNCIVAVSQNMGIGKNGDLPWPPLRNEFRYFQRMTTTSSVEGKQNLVIMGKKTWFSIPEKNRPLKGRINLVLSRELKEPPQGAHFLSRSLDDALKLTEQPELANKVDMVWIVGGSSVYKEAMNHPGHLKLFVTRIMQDFESDTFFPEIDLEKYKLLPGYPGVLSDVQEEKGFKYKFEVYEKND

SEQ ID NO: 1991 - DNA, 1806 bp, synthetic construct
  misc_feature 1..1806: note = Description of Artificial Sequence: Synthetic construct
  source 1..1806: mol_type = other DNA
atggactggacatggatactcttcctggtagcagccgccacacgagtgcacagcgactacaaagacgatgacgacaagaactgggtgaacgtgatctccgacctgaaaaagatcgaggatttgatccagagcatgcacattgacgccaccctgtataccgagtccgacgtgcacccgagttgcaaggtgactgccatgaagtgcttcctgctggagctgcaagtgatcagcctggagagcggcgacgccagcatccacgacaccgtggaaaaccttatcattctggccaacaatagcctgagcagcaacggcaacgtgaccgaaagcggatgtaaggaatgcgaggaactggaagagaagaatatcaaagaattcctgcaaagcttcgtgcacatcgtgcagatgttcatcaacacttcttcaggtggcggtagtggtgggggaggatctggaggcggaggaagcgggggtggaggttcaggtggaggcagcttgcaatacccatacgatgttccagattacgctattacctgcccccctccgatgagcgtggagcacgccgacatctgggtcaagagctacagcttgtatagtagggagcggtacatctgtaacagcgggttcaagaggaaggccgggaccagctcactgaccgagtgcgtgttgaacaaggccaccaacgtggcccactggaccacccctagccttaagtgcatcagggacccagcgctcgtacaccagagacccgcgcctccctctacggtaaccacggcaggcgtaaccccccagcccgagagcctgtccccgagcggcaaggagcctgcagcgagcagcccctcaagcaacaacacagccgctaccaccgcggcaatcgtgcccggcagccagctgatgccctcaaagagccccagcaccggcaccactgagataagcagccacgagagctcacacggcactccctcacagaccactgccaagaattgggagctgaccgcctctgccagccaccagcccccaggcgtgtatccccagggccacagcgacaccacggtcgccatcagcacatctacagtgcttttgtgcggccttagcgccgtgtcactgctggcatgctacttgaaaagtaggcaaactccccctcttgccagtgtggaaatggaggccatggaagccctgcccgtgacctggggcaccagttctagggacgaggaccttgagaactgctcacatcatttgggatccggtgttggttcgctaaactgcatcgtcgctgtgtcccagaacatgggcatcggcaagaacggggacctgccctggccaccgctcaggaatgaattcagatatttccagagaatgaccacaacctcttcagtagaaggtaaacagaatctggtgattatgggtaagaagacctggttctccattcctgagaagaatcgacctttaaagggtagaattaatttagttctcagcagagaactcaaggaacctccacaaggagctcattttctttccagaagtctagatgatgccttaaaacttactgaacaaccagaattagcaaataaagtagacatggtctggatagttggtggcagttctgtttataaggaagccatgaatcacccaggccatcttaaactatttgtgacaaggatcatgcaagactttgaaagtgacacgttttttccagaaattgatttggagaaatataaacttctgccaggatacccaggtgttctctctgatgtccaggaggagaaaggctttaagtacaaatttgaagtatatgagaagaatgattga

SEQ ID NO: 1992 - protein, 601 aa, synthetic construct
  REGION 1..601: note = Description of Artificial Sequence: Synthetic construct
MDWTWILFLVAAATRVHSDYKDDDDKNWVNVISDLKKIEDLIQSMHIDATLYTESDVHPSCKVTAMKCFLLELQVISLESGDASIHDTVENLIILANNSLSSNGNVTESGCKECEELEEKNIKEFLQSFVHIVQMFINTSSGGGSGGGGSGGGGSGGGGSGGGSLQYPYDVPDYAITCPPPMSVEHADIWVKSYSLYSRERYICNSGFKRKAGTSSLTECVLNKATNVAHWTTPSLKCIRDPALVHQRPAPPSTVTTAGVTPQPESLSPSGKEPAASSPSSNNTAATTAAIVPGSQLMPSKSPSTGTTEISSHESSHGTPSQTTAKNWELTASASHQPPGVYPQGHSDTTVAISTSTVLLCGLSAVSLLACYLKSRQTPPLASVEMEAMEALPVTWGTSSRDEDLENCSHHLGSGVGSLNCIVAVSQNMGIGKNGDLPWPPLRNEFRYFQRMTTTSSVEGKQNLVIMGKKTWFSIPEKNRPLKGRINLVLSRELKEPPQGAHFLSRSLDDALKLTEQPELANKVDMVWIVGGSSVYKEAMNHPGRLKLFVTRIMQDFGSDTFFPEIDLEKYKLLPEYPGVLSDVQEEKGIKYKFEVYEKND

SEQ ID NO: 1993 - DNA, 1806 bp, synthetic construct
  misc_feature 1..1806: note = Description of Artificial Sequence: Synthetic construct
  source 1..1806: mol_type = other DNA
atggactggacatggatactcttcctggtagcagccgccacacgagtgcacagcgactacaaagacgatgacgacaagaactgggtgaacgtgatctccgacctgaaaaagatcgaggatttgatccagagcatgcacattgacgccaccctgtataccgagtccgacgtgcacccgagttgcaaggtgactgccatgaagtgcttcctgctggagctgcaagtgatcagcctggagagcggcgacgccagcatccacgacaccgtggaaaaccttatcattctggccaacaatagcctgagcagcaacggcaacgtgaccgaaagcggatgtaaggaatgcgaggaactggaagagaagaatatcaaagaattcctgcaaagcttcgtgcacatcgtgcagatgttcatcaacacttcttcaggtggcggtagtggtgggggaggatctggaggcggaggaagcgggggtggaggttcaggtggaggcagcttgcaatacccatacgatgttccagattacgctattacctgcccccctccgatgagcgtggagcacgccgacatctgggtcaagagctacagcttgtatagtagggagcggtacatctgtaacagcgggttcaagaggaaggccgggaccagctcactgaccgagtgcgtgttgaacaaggccaccaacgtggcccactggaccacccctagccttaagtgcatcagggacccagcgctcgtacaccagagacccgcgcctccctctacggtaaccacggcaggcgtaaccccccagcccgagagcctgtccccgagcggcaaggagcctgcagcgagcagcccctcaagcaacaacacagccgctaccaccgcggcaatcgtgcccggcagccagctgatgccctcaaagagccccagcaccggcaccactgagataagcagccacgagagctcacacggcactccctcacagaccactgccaagaattgggagctgaccgcctctgccagccaccagcccccaggcgtgtatccccagggccacagcgacaccacggtcgccatcagcacatctacagtgcttttgtgcggccttagcgccgtgtcactgctggcatgctacttgaaaagtaggcaaactccccctcttgccagtgtggaaatggaggccatggaagccctgcccgtgacctggggcaccagttctagggacgaggaccttgagaactgctcacatcatttgggatccggtgttggttcgctaaactgcatcgtcgctgtgtcccagaacatgggcatcggcaagaacggggacctgccctggccaccgctcaggaatgaattcagatatttccagagaatgaccacaacctcttcagtagaaggtaaacagaatctggtgattatgggtaagaagacctggttctccattcctgagaagaatcgacctttaaagggtagaattaatttagttctcagcagagaactcaaggaacctccacaaggagctcattttctttccagaagtctagatgatgccttaaaacttactgaacaaccagaattagcaaataaagtagacatggtctggatagttggtggcagttctgtttataaggaagccatgaatcacccaggcagacttaaactatttgtgacaaggatcatgcaagactttggaagtgacacgttttttccagaaattgatttggagaaatataaacttctgccagaatacccaggtgttctctctgatgtccaggaggagaaaggcattaagtacaaatttgaagtatatgagaagaatgattga

SEQ ID NO: 1994 - protein, 601 aa, synthetic construct
  REGION 1..601: note = Description of Artificial Sequence: Synthetic construct
MDWTWILFLVAAATRVHSDYKDDDDKNWVNVISDLKKIEDLIQSMHIDATLYTESDVHPSCKVTAMKCFLLELQVISLESGDASIHDTVENLIILANNSLSSNGNVTESGCKECEELEEKNIKEFLQSFVHIVQMFINTSSGGGSGGGGSGGGGSGGGGSGGGSLQYPYDVPDYAITCPPPMSVEHADIWVKSYSLYSRERYICNSGFKRKAGTSSLTECVLNKATNVAHWTTPSLKCIRDPALVHQRPAPPSTVTTAGVTPQPESLSPSGKEPAASSPSSNNTAATTAAIVPGSQLMPSKSPSTGTTEISSHESSHGTPSQTTAKNWELTASASHQPPGVYPQGHSDTTVAISTSTVLLCGLSAVSLLACYLKSRQTPPLASVEMEAMEALPVTWGTSSRDEDLENCSHHLGSGVGSLNCIVAVSQNMGVGKNGDLPWPPLRNEFRYFQRMTTTSSVEGKQNLVIMGKKTWFSIPEKNRPLKGRINLVLSRELKEPPQGAHFLSRSLDDALKLTEQPELANKVDMVWIVGGSSVYKEAMNHPGHLKLFVTRIMQDFESDTFFPEIDLEKYKLLPEYPGVLSDVQEEKGIKYKFEVYEKND

SEQ ID NO: 1995 - DNA, 1806 bp, synthetic construct
  misc_feature 1..1806: note = Description of Artificial Sequence: Synthetic construct
  source 1..1806: mol_type = other DNA
atggactggacatggatactcttcctggtagcagccgccacacgagtgcacagcgactacaaagacgatgacgacaagaactgggtgaacgtgatctccgacctgaaaaagatcgaggatttgatccagagcatgcacattgacgccaccctgtataccgagtccgacgtgcacccgagttgcaaggtgactgccatgaagtgcttcctgctggagctgcaagtgatcagcctggagagcggcgacgccagcatccacgacaccgtggaaaaccttatcattctggccaacaatagcctgagcagcaacggcaacgtgaccgaaagcggatgtaaggaatgcgaggaactggaagagaagaatatcaaagaattcctgcaaagcttcgtgcacatcgtgcagatgttcatcaacacttcttcaggtggcggtagtggtgggggaggatctggaggcggaggaagcgggggtggaggttcaggtggaggcagcttgcaatacccatacgatgttccagattacgctattacctgcccccctccgatgagcgtggagcacgccgacatctgggtcaagagctacagcttgtatagtagggagcggtacatctgtaacagcgggttcaagaggaaggccgggaccagctcactgaccgagtgcgtgttgaacaaggccaccaacgtggcccactggaccacccctagccttaagtgcatcagggacccagcgctcgtacaccagagacccgcgcctccctctacggtaaccacggcaggcgtaaccccccagcccgagagcctgtccccgagcggcaaggagcctgcagcgagcagcccctcaagcaacaacacagccgctaccaccgcggcaatcgtgcccggcagccagctgatgccctcaaagagccccagcaccggcaccactgagataagcagccacgagagctcacacggcactccctcacagaccactgccaagaattgggagctgaccgcctctgccagccaccagcccccaggcgtgtatccccagggccacagcgacaccacggtcgccatcagcacatctacagtgcttttgtgcggccttagcgccgtgtcactgctggcatgctacttgaaaagtaggcaaactccccctcttgccagtgtggaaatggaggccatggaagccctgcccgtgacctggggcaccagttctagggacgaggaccttgagaactgctcacatcatttgggatccggtgttggttcgctaaactgcatcgtcgctgtgtcccagaacatgggcgtcggcaagaacggggacctgccctggccaccgctcaggaatgaattcagatatttccagagaatgaccacaacctcttcagtagaaggtaaacagaatctggtgattatgggtaagaagacctggttctccattcctgagaagaatcgacctttaaagggtagaattaatttagttctcagcagagaactcaaggaacctccacaaggagctcattttctttccagaagtctagatgatgccttaaaacttactgaacaaccagaattagcaaataaagtagacatggtctggatagttggtggcagttctgtttataaggaagccatgaatcacccaggccatcttaaactatttgtgacaaggatcatgcaagactttgaaagtgacacgttttttccagaaattgatttggagaaatataaacttctgccagaatacccaggtgttctctctgatgtccaggaggagaaaggcattaagtacaaatttgaagtatatgagaagaatgattga

SEQ ID NO: 1996 - protein, 601 aa, synthetic construct
  REGION 1..601: note = Description of Artificial Sequence: Synthetic construct
MDWTWILFLVAAATRVHSDYKDDDDKNWVNVISDLKKIEDLIQSMHIDATLYTESDVHPSCKVTAMKCFLLELQVISLESGDASIHDTVENLIILANNSLSSNGNVTESGCKECEELEEKNIKEFLQSFVHIVQMFINTSSGGGSGGGGSGGGGSGGGGSGGGSLQYPYDVPDYAITCPPPMSVEHADIWVKSYSLYSRERYICNSGFKRKAGTSSLTECVLNKATNVAHWTTPSLKCIRDPALVHQRPAPPSTVTTAGVTPQPESLSPSGKEPAASSPSSNNTAATTAAIVPGSQLMPSKSPSTGTTEISSHESSHGTPSQTTAKNWELTASASHQPPGVYPQGHSDTTVAISTSTVLLCGLSAVSLLACYLKSRQTPPLASVEMEAMEALPVTWGTSSRDEDLENCSHHLGSGVGSLNCIVAVSQNMGIGKNGDLPWPPLRNEFRYFQRMTTTSSVEGKQNLVIMGKKTWFSIPEKNRPLKGRINLVLSRELKEPPQGAHFLSRSLDDALKLTEQPELANKVDMVWIVGGSSVYKEAMYHPGHLKLFVTRIMQDFESDTFFPEIDLEKYKLLPEYPGVLSDVQEEKGIKYKFEVYEKND

SEQ ID NO: 1997 - DNA, 1806 bp, synthetic construct
  misc_feature 1..1806: note = Description of Artificial Sequence: Synthetic construct
  source 1..1806: mol_type = other DNA
atggactggacatggatactcttcctggtagcagccgccacacgagtgcacagcgactacaaagacgatgacgacaagaactgggtgaacgtgatctccgacctgaaaaagatcgaggatttgatccagagcatgcacattgacgccaccctgtataccgagtccgacgtgcacccgagttgcaaggtgactgccatgaagtgcttcctgctggagctgcaagtgatcagcctggagagcggcgacgccagcatccacgacaccgtggaaaaccttatcattctggccaacaatagcctgagcagcaacggcaacgtgaccgaaagcggatgtaaggaatgcgaggaactggaagagaagaatatcaaagaattcctgcaaagcttcgtgcacatcgtgcagatgttcatcaacacttcttcaggtggcggtagtggtgggggaggatctggaggcggaggaagcgggggtggaggttcaggtggaggcagcttgcaatacccatacgatgttccagattacgctattacctgcccccctccgatgagcgtggagcacgccgacatctgggtcaagagctacagcttgtatagtagggagcggtacatctgtaacagcgggttcaagaggaaggccgggaccagctcactgaccgagtgcgtgttgaacaaggccaccaacgtggcccactggaccacccctagccttaagtgcatcagggacccagcgctcgtacaccagagacccgcgcctccctctacggtaaccacggcaggcgtaaccccccagcccgagagcctgtccccgagcggcaaggagcctgcagcgagcagcccctcaagcaacaacacagccgctaccaccgcggcaatcgtgcccggcagccagctgatgccctcaaagagccccagcaccggcaccactgagataagcagccacgagagctcacacggcactccctcacagaccactgccaagaattgggagctgaccgcctctgccagccaccagcccccaggcgtgtatccccagggccacagcgacaccacggtcgccatcagcacatctacagtgcttttgtgcggccttagcgccgtgtcactgctggcatgctacttgaaaagtaggcaaactccccctcttgccagtgtggaaatggaggccatggaagccctgcccgtgacctggggcaccagttctagggacgaggaccttgagaactgctcacatcatttgggatccggtgttggttcgctaaactgcatcgtcgctgtgtcccagaacatgggcatcggcaagaacggggacctgccctggccaccgctcaggaatgaattcagatatttccagagaatgaccacaacctcttcagtagaaggtaaacagaatctggtgattatgggtaagaagacctggttctccattcctgagaagaatcgacctttaaagggtagaattaatttagttctcagcagagaactcaaggaacctccacaaggagctcattttctttccagaagtctagatgatgccttaaaacttactgaacaaccagaattagcaaataaagtagacatggtctggatagttggtggcagttctgtttataaggaagccatgtatcacccaggccatcttaaactatttgtgacaaggatcatgcaagactttgaaagtgacacgttttttccagaaattgatttggagaaatataaacttctgccagaatacccaggtgttctctctgatgtccaggaggagaaaggcattaagtacaaatttgaagtatatgagaagaatgattga

SEQ ID NO: 1998 - protein, 601 aa, synthetic construct
  REGION 1..601: note = Description of Artificial Sequence: Synthetic construct
MDWTWILFLVAAATRVHSDYKDDDDKNWVNVISDLKKIEDLIQSMHIDATLYTESDVHPSCKVTAMKCFLLELQVISLESGDASIHDTVENLIILANNSLSSNGNVTESGCKECEELEEKNIKEFLQSFVHIVQMFINTSSGGGSGGGGSGGGGSGGGGSGGGSLQYPYDVPDYAITCPPPMSVEHADIWVKSYSLYSRERYICNSGFKRKAGTSSLTECVLNKATNVAHWTTPSLKCIRDPALVHQRPAPPSTVTTAGVTPQPESLSPSGKEPAASSPSSNNTAATTAAIVPGSQLMPSKSPSTGTTEISSHESSHGTPSQTTAKNWELTASASHQPPGVYPQGHSDTTVAISTSTVLLCGLSAVSLLACYLKSRQTPPLASVEMEAMEALPVTWGTSSRDEDLENCSHHLGSGVGSLNCIVAVSQNMGVGKNGDLPWPPLRNEFRYFQRMTTTSSVEGKQNLVIMGKKTWFSIPEKNRPLKGRINLVLSRELKEPPQGAHFLSRSLDDALKLTEQPELANKVDMVWIVGGSSVIKEAMNHPGHLKLFVTRIMQDFESDTFFPEIDLEKYKLLPEYPGVLSDVQEEKGIKYKFEVYEKND

SEQ ID NO: 1999 - DNA, 1806 bp, synthetic construct
  misc_feature 1..1806: note = Description of Artificial Sequence: Synthetic construct
  source 1..1806: mol_type = other DNA
atggactggacatggatactcttcctggtagcagccgccacacgagtgcacagcgactacaaagacgatgacgacaagaactgggtgaacgtgatctccgacctgaaaaagatcgaggatttgatccagagcatgcacattgacgccaccctgtataccgagtccgacgtgcacccgagttgcaaggtgactgccatgaagtgcttcctgctggagctgcaagtgatcagcctggagagcggcgacgccagcatccacgacaccgtggaaaaccttatcattctggccaacaatagcctgagcagcaacggcaacgtgaccgaaagcggatgtaaggaatgcgaggaactggaagagaagaatatcaaagaattcctgcaaagcttcgtgcacatcgtgcagatgttcatcaacacttcttcaggtggcggtagtggtgggggaggatctggaggcggaggaagcgggggtggaggttcaggtggaggcagcttgcaatacccatacgatgttccagattacgctattacctgcccccctccgatgagcgtggagcacgccgacatctgggtcaagagctacagcttgtatagtagggagcggtacatctgtaacagcgggttcaagaggaaggccgggaccagctcactgaccgagtgcgtgttgaacaaggccaccaacgtggcccactggaccacccctagccttaagtgcatcagggacccagcgctcgtacaccagagacccgcgcctccctctacggtaaccacggcaggcgtaaccccccagcccgagagcctgtccccgagcggcaaggagcctgcagcgagcagcccctcaagcaacaacacagccgctaccaccgcggcaatcgtgcccggcagccagctgatgccctcaaagagccccagcaccggcaccactgagataagcagccacgagagctcacacggcactccctcacagaccactgccaagaattgggagctgaccgcctctgccagccaccagcccccaggcgtgtatccccagggccacagcgacaccacggtcgccatcagcacatctacagtgcttttgtgcggccttagcgccgtgtcactgctggcatgctacttgaaaagtaggcaaactccccctcttgccagtgtggaaatggaggccatggaagccctgcccgtgacctggggcaccagttctagggacgaggaccttgagaactgctcacatcatttgggatccggtgttggttcgctaaactgcatcgtcgctgtgtcccagaacatgggcgtcggcaagaacggggacctgccctggccaccgctcaggaatgaattcagatatttccagagaatgaccacaacctcttcagtagaaggtaaacagaatctggtgattatgggtaagaagacctggttctccattcctgagaagaatcgacctttaaagggtagaattaatttagttctcagcagagaactcaaggaacctccacaaggagctcattttctttccagaagtctagatgatgccttaaaacttactgaacaaccagaattagcaaataaagtagacatggtctggatagttggtggcagttctgttattaaggaagccatgaatcacccaggccatcttaaactatttgtgacaaggatcatgcaagactttgaaagtgacacgttttttccagaaattgatttggagaaatataaacttctgccagaatacccaggtgttctctctgatgtccaggaggagaaaggcattaagtacaaatttgaagtatatgagaagaatgattga

SEQ ID NO: 2000 - protein, 681 aa, synthetic construct
  REGION 1..681: note = Description of Artificial Sequence: Synthetic construct
MDWTWILFLVAAATRVHSNWVNVISDLKKIEDLIQSMHIDATLYTESDVHPSCKVTAMKCFLLELQVISLESGDASIHDTVENLIILANNSLSSNGNVTESGCKECEELEEKNIKEFLQSFVHIVQMFINTSSGGGSGGGGSGGGGSGGGGSGGGSLQITCPPPMSVEHADIWVKSYSLYSRERYICNSGFKRKAGTSSLTECVLNKATNVAHWTTPSLKCIRDPALVHQRPAPPSTVTTAGVTPQPESLSPSGKEPAASSPSSNNTAATTAAIVPGSQLMPSKSPSTGTTEISSHESSHGTPSQTTAKNWELTASASHQPPGVYPQGHSDTTVAISTSTVLLCGLSAVSLLACYLKSRQTPPLASVEMEAMEALPVTWGTSSRDEDLENCSHHLSRMDYKDDDDKDYKDDDDKDYKDDDDKSRGSGATNFSLLKQAGDVEENPGPLSKGEEDNMAIIKEFMRFKVHMEGSVNGHEFEIEGEGEGRPYEGTQTAKLKVTKGGPLPFAWDILSPQFMYGSKAYVKHPADIPDYLKLSFPEGFKWERVMNFEDGGVVTVTQDSSLQDGEFIYKVKLRGTNFPSDGPVMQKKTMGWEASSERMYPEDGALKGEIKQRLKLKDGGHYDAEVKTTYKAKKPVQLPGAYNVNIKLDITSHNEDYTIVEQYERAEGRHSTGGMDELYK

SEQ ID NO: 2001 - DNA, 2046 bp, synthetic construct
  misc_feature 1..2046: note = Description of Artificial Sequence: Synthetic construct
  source 1..2046: mol_type = other DNA
atggattggacctggattctgtttctggtggccgctgccacaagagtgcacagcaactgggtgaatgtgatcagcgacctgaagaagatcgaggatctgatccagagcatgcacattgatgccaccctgtacacagaatctgatgtgcaccctagctgtaaagtgaccgccatgaagtgttttctgctggagctgcaggtgatttctctggaaagcggagatgcctctatccacgacacagtggagaatctgatcatcctggccaacaatagcctgagcagcaatggcaatgtgacagagtctggctgtaaggagtgtgaggagctggaggagaagaacatcaaggagtttctgcagagctttgtgcacatcgtgcagatgttcatcaatacaagctctggcggaggatctggaggaggcggatctggaggaggaggcagtggaggcggaggatctggcggaggatctctgcagattacatgccctcctccaatgtctgtggagcacgccgatatttgggtgaagtcctacagcctgtacagcagagagagatacatctgcaacagcggctttaagagaaaggccggcacctcttctctgacagagtgcgtgctgaataaggccacaaatgtggcccactggacaacacctagcctgaagtgcattagagatcctgccctggtccaccagaggcctgcccctccatctacagtgacaacagccggagtgacacctcagcctgaatctctgagcccttctggaaaagaacctgccgccagctctcctagctctaataataccgccgccacaacagccgccattgtgcctggatctcagctgatgcctagcaagtctcctagcacaggcacaacagagatcagcagccacgaatcttctcacggaacaccttctcagaccaccgccaagaattgggagctgacagcctctgcctctcaccagcctccaggagtgtatcctcagggccactctgatacaacagtggccatcagcacatctacagtgctgctgtgtggactgtctgccgtgtctctgctggcctgttacctgaagtctagacagacacctcctctggcctctgtggagatggaggccatggaagccctgcctgtgacatggggaacaagcagcagagatgaggacctggagaattgttctcaccacctgtcgcgaatggactacaaggacgatgacgacaaggattataaagatgatgatgataaagattataaagacgacgatgataagtcgcgaggatccggagctactaacttcagcctgctgaagcaggctggagacgtggaggagaaccctggacctttgagcaagggcgaggaggacaacatggccatcatcaaggagttcatgcgcttcaaggtgcacatggagggctccgtgaacggccacgagttcgagatcgagggcgagggcgagggccgcccctacgagggcacccagaccgccaagctgaaggtgaccaagggcggccccctgcccttcgcctgggacatcctgtcccctcagttcatgtacggctccaaggcctacgtgaagcaccccgccgacatccccgactacttgaagctgtccttccccgagggcttcaagtgggagcgcgtgatgaacttcgaggacggcggcgtggtgaccgtgacccaggactcctccctgcaggacggcgagttcatctacaaggtgaagctgcgcggcaccaacttcccctccgacggccccgtaatgcagaagaagaccatgggctgggaggcctcctccgagcggatgtaccccgaggacggcgccctgaagggcgagatcaagcagaggctgaagctgaaggacggcggccactacgacgccgaggtcaagaccacctacaaggccaagaagcccgtgcagctgcccggcgcctacaacgtcaacatcaagctggacatcacctcccacaacgaggactacaccatcgtggaacagtacgagcgcgccgagggccgccactccaccggcggcatggacgagctgtacaagtaa

SEQ ID NO: 2002 - protein, 652 aa, synthetic construct
  REGION 1..652: note = Description of Artificial Sequence: Synthetic construct
MDWTWILFLVAAATRVHSNWVNVISDLKKIEDLIQSMHIDATLYTESDVHPSCKVTAMKCFLLELQVISLESGDASIHDTVENLIILANNSLSSNGNVTESGCKECEELEEKNIKEFLQSFVHIVQMFINTSSGGGSGGGGSGGGGSGGGGSGGGSLQITCPPPMSVEHADIWVKSYSLYSRERYICNSGFKRKAGTSSLTECVLNKATNVAHWTTPSLKCIRDPALVHQRPAPPSTVTTAGVTPQPESLSPSGKEPAASSPSSNNTAATTAAIVPGSQLMPSKSPSTGTTEISSHESSHGTPSQTTAKNWELTASASHQPPGVYPQGHSDTTVAISTSTVLLCGLSAVSLLACYLKSRQTPPLASVEMEAMEALPVTWGTSSRDEDLENCSHHLGSGATNFSLLKQAGDVEENPGPLSKGEEDNMAIIKEFMRFKVHMEGSVNGHEFEIEGEGEGRPYEGTQTAKLKVTKGGPLPFAWDILSPQFMYGSKAYVKHPADIPDYLKLSFPEGFKWERVMNFEDGGVVTVTQDSSLQDGEFIYKVKLRGTNFPSDGPVMQKKTMGWEASSERMYPEDGALKGEIKQRLKLKDGGHYDAEVKTTYKAKKPVQLPGAYNVNIKLDITSHNEDYTIVEQYERAEGRHSTGGMDELYK

SEQ ID NO: 2003 - DNA, 1959 bp, synthetic construct
  misc_feature 1..1959: note = Description of Artificial Sequence: Synthetic construct
  source 1..1959: mol_type = other DNA
atggattggacctggattctgtttctggtggccgctgccacaagagtgcacagcaactgggtgaatgtgatcagcgacctgaagaagatcgaggatctgatccagagcatgcacattgatgccaccctgtacacagaatctgatgtgcaccctagctgtaaagtgaccgccatgaagtgttttctgctggagctgcaggtgatttctctggaaagcggagatgcctctatccacgacacagtggagaatctgatcatcctggccaacaatagcctgagcagcaatggcaatgtgacagagtctggctgtaaggagtgtgaggagctggaggagaagaacatcaaggagtttctgcagagctttgtgcacatcgtgcagatgttcatcaatacaagctctggcggaggatctggaggaggcggatctggaggaggaggcagtggaggcggaggatctggcggaggatctctgcagattacatgccctcctccaatgtctgtggagcacgccgatatttgggtgaagtcctacagcctgtacagcagagagagatacatctgcaacagcggctttaagagaaaggccggcacctcttctctgacagagtgcgtgctgaataaggccacaaatgtggcccactggacaacacctagcctgaagtgcattagagatcctgccctggtccaccagaggcctgcccctccatctacagtgacaacagccggagtgacacctcagcctgaatctctgagcccttctggaaaagaacctgccgccagctctcctagctctaataataccgccgccacaacagccgccattgtgcctggatctcagctgatgcctagcaagtctcctagcacaggcacaacagagatcagcagccacgaatcttctcacggaacaccttctcagaccaccgccaagaattgggagctgacagcctctgcctctcaccagcctccaggagtgtatcctcagggccactctgatacaacagtggccatcagcacatctacagtgctgctgtgtggactgtctgccgtgtctctgctggcctgttacctgaagtctagacagacacctcctctggcctctgtggagatggaggccatggaagccctgcctgtgacatggggaacaagcagcagagatgaggacctggagaattgttctcaccacctgggatccggagctactaacttcagcctgctgaagcaggctggagacgtggaggagaaccctggacctttgagcaagggcgaggaggacaacatggccatcatcaaggagttcatgcgcttcaaggtgcacatggagggctccgtgaacggccacgagttcgagatcgagggcgagggcgagggccgcccctacgagggcacccagaccgccaagctgaaggtgaccaagggcggccccctgcccttcgcctgggacatcctgtcccctcagttcatgtacggctccaaggcctacgtgaagcaccccgccgacatccccgactacttgaagctgtccttccccgagggcttcaagtgggagcgcgtgatgaacttcgaggacggcggcgtggtgaccgtgacccaggactcctccctgcaggacggcgagttcatctacaaggtgaagctgcgcggcaccaacttcccctccgacggccccgtaatgcagaagaagaccatgggctgggaggcctcctccgagcggatgtaccccgaggacggcgccctgaagggcgagatcaagcagaggctgaagctgaaggacggcggccactacgacgccgaggtcaagaccacctacaaggccaagaagcccgtgcagctgcccggcgcctacaacgtcaacatcaagctggacatcacctcccacaacgaggactacaccatcgtggaacagtacgagcgcgccgagggccgccactccaccggcggcatggacgagctgtacaagtaa

SEQ ID NO: 2004 - protein, 320 aa, synthetic construct
  REGION 1..320: note = Description of Artificial Sequence: Synthetic construct
MDWTWILFLVAAATRVHSNWVNVISDLKKIEDLIQSMHIDATLYTESDVHPSCKVTAMKCFLLELQVISLESGDASIHDTVENLIILANNSLSSNGNVTESGCKECEELEEKNIKEFLQSFVHIVQMFINTSGSVGSLNCIVAVSQNMGIGKNGDLPWPPLRNEFRYFQRMTTTSSVEGKQNLVIMGKKTWFSIPEKNRPLKGRINLVLSRELKEPPQGAHFLSRSLDDALKLTEQPELANKVDMVWIVGGSSVIKEAMNHPGHLKLFVTRIMQDFESDTFFPEIDLEKYKLLPEYPGVLSDVQEEKGIKYKFEVYEKND

SEQ ID NO: 2005 - protein, 14 aa, synthetic construct
  REGION 1..14: note = Description of Artificial Sequence: Synthetic construct
YDSLEIPPLSLPPP

SEQ ID NO: 2006 - protein, 43 aa, synthetic construct; identical to SEQ ID NO: 697
  REGION 1..43: note = Description of Artificial Sequence: Synthetic construct

SEQ ID NO: 2007 - protein, 102 aa, synthetic construct; identical to SEQ ID NO: 698
  REGION 1..102: note = Description of Artificial Sequence: Synthetic construct

SEQ ID NO: 2008 - protein, 41 aa, synthetic construct; identical to SEQ ID NO: 699
  REGION 1..41: note = Description of Artificial Sequence: Synthetic construct

SEQ ID NO: 2009 - protein, 24 aa, synthetic construct
  REGION 1..24: note = Description of Artificial Sequence: Synthetic construct
ARARRITWPSSRSSCASRCTWRAP

SEQ ID NO: 2010 - protein, 23 aa, synthetic construct
  REGION 1..23: note = Description of Artificial Sequence: Synthetic construct
TATSSRSRARARAAPTRAPRPPS

SEQ ID NO: 2011 - protein, 24 aa, synthetic construct
  REGION 1..24: note = Description of Artificial Sequence: Synthetic construct
PRVAPCPSPGTSCPLSSCTAPRPT

SEQ ID NO: 2012 - protein, 9 aa, synthetic construct
  REGION 1..9: note = Description of Artificial Sequence: Synthetic construct
STPPTSPTT

SEQ ID NO: 2013 - protein, 12 aa, synthetic construct
  REGION 1..12: note = Description of Artificial Sequence: Synthetic construct
SCPSPRASSGSA

SEQ ID NO: 2014 - protein, 7 aa, synthetic construct
  REGION 1..7: note = Description of Artificial Sequence: Synthetic construct
TSRTAAW

SEQ ID NO: 2015 - protein, 14 aa, synthetic construct
  REGION 1..14: note = Description of Artificial Sequence: Synthetic construct
PRTPPCRTASSSTR

SEQ ID NO: 2016 - protein, 12 aa, synthetic construct
  REGION 1..12: note = Description of Artificial Sequence: Synthetic construct
SCAAPTSPPTAP

SEQ ID NO: 2017 - protein, 21 aa, synthetic construct
  REGION 1..21: note = Description of Artificial Sequence: Synthetic construct
CRRRPWAGRPPPSGCTPRTAP

SEQ ID NO: 2018 - protein, 7 aa, synthetic construct
  REGION 1..7: note = Description of Artificial Sequence: Synthetic construct
RARSSRG

SEQ ID NO: 2019 - protein, 64 aa, synthetic construct; identical to SEQ ID NO: 710
  REGION 1..64: note = Description of Artificial Sequence: Synthetic construct

SEQ ID NO: 2020 - DNA, 2291 bp, synthetic construct
  misc_feature 1..2291: note = Description of Artificial Sequence: Synthetic construct
  source 1..2291: mol_type = other DNA
atggactggacatggatactcttcctggtagcagccgccacacgagtgcacagcaactgggtgaatgtaataagtgatttgaaaaaaattgaagatcttattcaatctatgcatattgatgctactttatatacggaaagtgatgttcaccccagttgcaaagtaacagcaatgaagtgctttctcttggagttacaagttatttcacttgagtccggagatgcaagtattcatgatacagtagaaaatctgatcatcctagcaaacaacagtttgtcttctaatgggaatgtaacagaatctggatgcaaagaatgtgaggaactggaggaaaaaaatattaaagaatttttgcagagttttgtacatattgtccaaatgttcatcaacacttctggttccgttggttcgctaaactgcatcgtcgctgtgtcccagaacatgggcatcggcaagaacggggacctgccctggccaccgctcaggaatgaattcagatatttccagagaatgaccacaacctcttcagtagaaggtaaacagaatctggtgattatgggtaagaagacctggttctccattcctgagaagaatcgacctttaaagggtagaattaatttagttctcagcagagaactcaaggaacctccacaaggagctcattttctttccagaagtctagatgatgccttaaaacttactgaacaaccagaattagcaaataaagtagacatggtctggatagttggtggcagttctgttattaaggaagccatgaatcacccaggccatcttaaactatttgtgacaaggatcatgcaagactttgaaagtgacacgttttttccagaaattgatttggagaaatataaacttctgccagaatacccaggtgttctctctgatgtccaggaggagaaaggcattaagtacaaatttgaagtatatgagaagaatgattgatctagataatacgactcactagagatcccgcccctctccctcccccccccctaacgttactggccgaagccgcttggaataaggccggtgtgcgtttgtctatatgttattttccaccatattgccgtcttttggcaatgtgagggcccggaaacctggccctgtcttcttgacgagcattcctaggggtctttcccctctcgccaaaggaatgcaaggtctgttgaatgtcgtgaaggaagcagttcctctggaagcttcttgaagacaaacaacgtctgtagcgaccctttgcaggcagcggaaccccccacctggcgacaggtgcctctgcggccaaaagccacgtgtataagatacacctgcaaaggcggcacaaccccagtgccacgttgtgagttggatagttgtggaaagagtcaaatggctctcctcaagcgtattcaacaaggggctgaaggatgcccagaaggtaccccattgtatgggatctgatctggggcctcggtgcacatgctttacatgtgtttagtcgaggttaaaaaaacgtctaggccccccgaaccacggggacgtggttttcctttgaaaaacacgatgataatatggccacaaccatgatgagcaagggcgaggaggataacatggccatcatcaaggagttcatgcgcttcaaggtgcacatggagggctccgtgaacggccacgagttcgagatcgagggcgagggcgagggccgcccctacgagggcacccagaccgccaagctgaaggtgaccaagggtggccccctgcccttcgcctgggacatcctgtcccctcagttcatgtacggctccaaggcctacgtgaagcaccccgccgacatccccgactacttgaagctgtccttccccgagggcttcaagtgggagcgcgtgatgaacttcgaggacggcggcgtggtgaccgtgacccaggactcctccctgcaggacggcgagttcatctacaaggtgaagctgcgcggcaccaacttcccctccgacggccccgtaatgcagaagaagaccatgggctgggaggcctcctccgagcggatgtaccccgaggacggcgccctgaagggcgagatcaagcagaggctgaagctgaaggacggcggccactacgacgctgaggtcaagaccacctacaaggccaagaagcccgtgcagctgcccggcgcctacaacgtcaacatcaagttggacatcacctcccacaacgaggactacaccatcgtggaacagtacgaacgcgccgagggccgccactccaccggcggcatggacgagctgtacaagtaa

SEQ ID NO: 2021 - protein, 320 aa, synthetic construct; identical to SEQ ID NO: 2004
  REGION 1..320: note = Description of Artificial Sequence: Synthetic construct

SEQ ID NO: 2022 - DNA, 963 bp, synthetic construct
  misc_feature 1..963: note = Description of Artificial Sequence: Synthetic construct
  source 1..963: mol_type = other DNA
atggactggacatggatactcttcctggtagcagccgccacacgagtgcacagcaactgggtgaatgtaataagtgatttgaaaaaaattgaagatcttattcaatctatgcatattgatgctactttatatacggaaagtgatgttcaccccagttgcaaagtaacagcaatgaagtgctttctcttggagttacaagttatttcacttgagtccggagatgcaagtattcatgatacagtagaaaatctgatcatcctagcaaacaacagtttgtcttctaatgggaatgtaacagaatctggatgcaaagaatgtgaggaactggaggaaaaaaatattaaagaatttttgcagagttttgtacatattgtccaaatgttcatcaacacttctggttccgttggttcgctaaactgcatcgtcgctgtgtcccagaacatgggcatcggcaagaacggggacctgccctggccaccgctcaggaatgaattcagatatttccagagaatgaccacaacctcttcagtagaaggtaaacagaatctggtgattatgggtaagaagacctggttctccattcctgagaagaatcgacctttaaagggtagaattaatttagttctcagcagagaactcaaggaacctccacaaggagctcattttctttccagaagtctagatgatgccttaaaacttactgaacaaccagaattagcaaataaagtagacatggtctggatagttggtggcagttctgttattaaggaagccatgaatcacccaggccatcttaaactatttgtgacaaggatcatgcaagactttgaaagtgacacgttttttccagaaattgatttggagaaatataaacttctgccagaatacccaggtgttctctctgatgtccaggaggagaaaggcattaagtacaaatttgaagtatatgagaagaatgattga

SEQ ID NO: 2023 - protein, 235 aa, synthetic construct; identical to SEQ ID NO: 1939
  REGION 1..235: note = Description of Artificial Sequence: Synthetic construct

SEQ ID NO: 2024 - DNA, 708 bp, synthetic construct; identical to SEQ ID NO: 1940
  misc_feature 1..708: note = Description of Artificial Sequence: Synthetic construct
  source 1..708: mol_type = other DNA

SEQ ID NO: 2025 - protein, 134 aa, synthetic construct
  REGION 1..134: note = Description of Artificial Sequence: Synthetic construct
MDWTWILFLVAAATRVHSNWVNVISDLKKIEDLIQSMHIDATLYTESDVHPSCKVTAMKCFLLELQVISLESGDASIHDTVENLIILANNSLSSNGNVTESGCKECEELEEKNIKEFLQSFVHIVQMFINTSGS

SEQ ID NO: 2026 - protein, 7 aa, synthetic construct
  REGION 1..7: note = Description of Artificial Sequence: Synthetic construct
NLDNTTH

SEQ ID NO: 2027 - protein, 19 aa, synthetic construct
  REGION 1..19: note = Description of Artificial Sequence: Synthetic construct
RSRPSPSPPPNVTGRSRLE

SEQ ID NO: 2028 - protein, 60 aa, synthetic construct
  REGION 1..60: note = Description of Artificial Sequence: Synthetic construct
GRCAFVYMLFSTILPSFGNVRARKPGPVFLTSIPRGLSPLAKGMQGLLNVVKEAVPLEAS

SEQ ID NO: 2029 - protein, 29 aa, synthetic construct
  REGION 1..29: note = Description of Artificial Sequence: Synthetic construct
RQTTSVATLCRQRNPPPGDRCLCGQKPRV

SEQ ID NO: 2030 - protein, 58 aa, synthetic construct
  REGION 1..58: note = Description of Artificial Sequence: Synthetic construct
DTPAKAAQPQCHVVSWIVVERVKWLSSSVFNKGLKDAQKVPHCMGSDLGPRCTCFTCV

SEQ ID NO: 2031 - protein, 18 aa, synthetic construct
  REGION 1..18: note = Description of Artificial Sequence: Synthetic construct
SRLKKRLGPPNHGDVVFL

SEQ ID NO: 2032 - protein, 12 aa, synthetic construct
  REGION 1..12: note = Description of Artificial Sequence: Synthetic construct
YGHNHDEQGRGG

SEQ ID NO: 2033 - protein, 171 aa, synthetic construct
  REGION 1..171: note = Description of Artificial Sequence: Synthetic construct
HGHHQGVHALQGAHGGLRERPRVRDRGRGRGPPLRGHPDRQAEGDQGWPPALRLGHPVPSVHVRLQGLREAPRRHPRLLEAVLPRGLQVGARDELRGRRRGDRDPGLLPAGRRVHLQGEAARHQLPLRRPRNAEEDHGLGGLLRADVPRGRRPEGRDQAEAEAEGRRPLRR

SEQ ID NO: 2034 - protein, 56 aa, synthetic construct
  REGION 1..56: note = Description of Artificial Sequence: Synthetic construct
GQDHLQGQEARAAARRLQRQHQVGHHLPQRGLHHRGTVRTRRGPPLHRRHGRAVQV

SEQ ID NO: 2035 - DNA, 1735 bp, synthetic construct
  misc_feature 1..1735: note = Description of Artificial Sequence: Synthetic construct
  source 1..1735: mol_type = other DNA
atggactggacatggatactcttcctggtagcagccgccacacgagtgcacagcaactgggtgaatgtaataagtgatttgaaaaaaattgaagatcttattcaatctatgcatattgatgctactttatatacggaaagtgatgttcaccccagttgcaaagtaacagcaatgaagtgctttctcttggagttacaagttatttcacttgagtccggagatgcaagtattcatgatacagtagaaaatctgatcatcctagcaaacaacagtttgtcttctaatgggaatgtaacagaatctggatgcaaagaatgtgaggaactggaggaaaaaaatattaaagaatttttgcagagttttgtacatattgtccaaatgttcatcaacacttctggatcctgaaatctagataatacgactcactagagatcccgcccctctccctcccccccccctaacgttactggccgaagccgcttggaataaggccggtgtgcgtttgtctatatgttattttccaccatattgccgtcttttggcaatgtgagggcccggaaacctggccctgtcttcttgacgagcattcctaggggtctttcccctctcgccaaaggaatgcaaggtctgttgaatgtcgtgaaggaagcagttcctctggaagcttcttgaagacaaacaacgtctgtagcgaccctttgcaggcagcggaaccccccacctggcgacaggtgcctctgcggccaaaagccacgtgtataagatacacctgcaaaggcggcacaaccccagtgccacgttgtgagttggatagttgtggaaagagtcaaatggctctcctcaagcgtattcaacaaggggctgaaggatgcccagaaggtaccccattgtatgggatctgatctggggcctcggtgcacatgctttacatgtgtttagtcgaggttaaaaaaacgtctaggccccccgaaccacggggacgtggttttcctttgaaaaacacgatgataatatggccacaaccatgatgagcaagggcgaggaggataacatggccatcatcaaggagttcatgcgcttcaaggtgcacatggagggctccgtgaacggccacgagttcgagatcgagggcgagggcgagggccgcccctacgagggcacccagaccgccaagctgaaggtgaccaagggtggccccctgcccttcgcctgggacatcctgtcccctcagttcatgtacggctccaaggcctacgtgaagcaccccgccgacatccccgactacttgaagctgtccttccccgagggcttcaagtgggagcgcgtgatgaacttcgaggacggcggcgtggtgaccgtgacccaggactcctccctgcaggacggcgagttcatctacaaggtgaagctgcgcggcaccaacttcccctccgacggccccgtaatgcagaagaagaccatgggctgggaggcctcctccgagcggatgtaccccgaggacggcgccctgaagggcgagatcaagcagaggctgaagctgaaggacggcggccactacgacgctgaggtcaagaccacctacaaggccaagaagcccgtgcagctgcccggcgcctacaacgtcaacatcaagttggacatcacctcccacaacgaggactacaccatcgtggaacagtacgaacgcgccgagggccgccactccaccggcggcatggacgagctgtacaagtaa

SEQ ID NO: 2036 - protein, 134 aa, synthetic construct; identical to SEQ ID NO: 2025
  REGION 1..134: note = Description of Artificial Sequence: Synthetic construct

SEQ ID NO: 2037 - DNA, 405 bp, synthetic construct
  misc_feature 1..405: note = Description of Artificial Sequence: Synthetic construct
  source 1..405: mol_type = other DNA
atggactggacatggatactcttcctggtagcagccgccacacgagtgcacagcaactgggtgaatgtaataagtgatttgaaaaaaattgaagatcttattcaatctatgcatattgatgctactttatatacggaaagtgatgttcaccccagttgcaaagtaacagcaatgaagtgctttctcttggagttacaagttatttcacttgagtccggagatgcaagtattcatgatacagtagaaaatctgatcatcctagcaaacaacagtttgtcttctaatgggaatgtaacagaatctggatgcaaagaatgtgaggaactggaggaaaaaaatattaaagaatttttgcagagttttgtacatattgtccaaatgttcatcaacacttctggatcctga

SEQ ID NO: 2038 - protein, 235 aa, synthetic construct; identical to SEQ ID NO: 1939
  REGION 1..235: note = Description of Artificial Sequence: Synthetic construct

SEQ ID NO: 2039 - DNA, 708 bp, synthetic construct; identical to SEQ ID NO: 1940
  misc_feature 1..708: note = Description of Artificial Sequence: Synthetic construct
  source 1..708: mol_type = other DNA

SEQ ID NO: 2040 - protein, 30 aa, synthetic construct; identical to SEQ ID NO: 1919
  REGION 1..30: note = Description of Artificial Sequence: Synthetic signal sequence

SEQ ID NO: 2041 - DNA, 90 bp, synthetic construct; identical to SEQ ID NO: 1724
  misc_feature 1..90: note = Description of Artificial Sequence: Synthetic signal sequence
  source 1..90: mol_type = other DNA

SEQ ID NO: 2042 - protein, 26 aa, synthetic construct
  REGION 1..26: note = Description of Artificial Sequence: Synthetic linker
SGGGSGGGGSGGGGSGGGGSGGGSLQ

SEQ ID NO: 2043 - DNA, 78 bp, synthetic construct; identical to SEQ ID NO: 1647
  misc_feature 1..78: note = Description of Artificial Sequence: Synthetic linker
  source 1..78: mol_type = other DNA

SEQ ID NO: 2044 - DNA, 78 bp, synthetic construct; identical to SEQ ID NO: 1648
  misc_feature 1..78: note = Description of Artificial Sequence: Synthetic linker
  source 1..78: mol_type = other DNA

SEQ ID NO: 2045 - DNA, 78 bp, synthetic construct; identical to SEQ ID NO: 1649
  misc_feature 1..78: note = Description of Artificial Sequence: Synthetic linker
  source 1..78: mol_type = other DNA

SEQ ID NO: 2046 - DNA, 78 bp, synthetic construct; identical to SEQ ID NO: 1650
  misc_feature 1..78: note = Description of Artificial Sequence: Synthetic linker
  source 1..78: mol_type = other DNA

SEQ ID NO: 2047 - DNA, 78 bp, synthetic construct; identical to SEQ ID NO: 1651
  misc_feature 1..78: note = Description of Artificial Sequence: Synthetic linker
  source 1..78: mol_type = other DNA

SEQ ID NO: 2048 - DNA, 78 bp, synthetic construct; identical to SEQ ID NO: 1652
  misc_feature 1..78: note = Description of Artificial Sequence: Synthetic linker
  source 1..78: mol_type = other DNA

SEQ ID NO: 2049 - protein, 5 aa, synthetic construct
  REGION 1..5: note = Description of Artificial Sequence: Synthetic linker
SGGGS

SEQ ID NO: 2050 - DNA, 15 bp, synthetic construct
  misc_feature 1..15: note = Description of Artificial Sequence: Synthetic linker
  source 1..15: mol_type = other DNA
tcaggtggcggtagt

SEQ ID NO: 2051 - DNA, 15 bp, synthetic construct
  misc_feature 1..15: note = Description of Artificial Sequence: Synthetic linker
  source 1..15: mol_type = other DNA
agcggcggtggcagc

SEQ ID NO: 2052 - DNA, 15 bp, synthetic construct
  misc_feature 1..15: note = Description of Artificial Sequence: Synthetic linker
  source 1..15: mol_type = other DNA
tcaggcggggggagt

SEQ ID NO: 2053 - protein, 34 aa, synthetic construct; identical to SEQ ID NO: 1924
  REGION 1..34: note = Description of Artificial Sequence: Synthetic linker

SEQ ID NO: 2054 - DNA, 102 bp, synthetic construct; identical to SEQ ID NO: 1925
  misc_feature 1..102: note = Description of Artificial Sequence: Synthetic linker
  source 1..102: mol_type = other DNA

SEQ ID NO: 2055 - protein, 20 aa, synthetic construct
  REGION 1..20: note = Description of Artificial Sequence: Synthetic linker
SGGGSGGGGSGGGGSGGGGS

SEQ ID NO: 2056 - DNA, 60 bp, synthetic construct; identical to SEQ ID NO: 1927
  misc_feature 1..60: note = Description of Artificial Sequence: Synthetic linker
  source 1..60: mol_type = other DNA

SEQ ID NO: 2057-2060 - skipped (4 entries)

SEQ ID NO: 2061 - DNA, 28 bp, synthetic construct
  misc_feature 1..28: note = Description of Artificial Sequence: Synthetic spacer
  source 1..28: mol_type = other DNA
tctagataatacgactcactagagatcc

SEQ ID NO: 2062 - DNA, 16 bp, synthetic construct
  misc_feature 1..16: note = Description of Artificial Sequence: Synthetic spacer
  source 1..16: mol_type = other DNA
tatggccacaaccatg

SEQ ID NO: 2063 - DNA, 30 bp, synthetic construct; identical to SEQ ID NO: 1934
  misc_feature 1..30: note = Description of Artificial Sequence: Synthetic spacer
  source 1..30: mol_type = other DNA

SEQ ID NO: 2064 - protein, 69 aa, Homo sapiens; identical to SEQ ID NO: 607

SEQ ID NO: 2065 - DNA, 207 bp, Homo sapiens; identical to SEQ ID NO: 1549
  source 1..207: mol_type = other DNA

SEQ ID NO: 2066 - DNA, 714 bp, Homo sapiens; identical to SEQ ID NO: 1622
  source 1..714: mol_type = other DNA

SEQ ID NO: 2067 - DNA, 711 bp, synthetic construct; identical to SEQ ID NO: 1623
  misc_feature 1..711: note = Description of Artificial Sequence: Synthetic construct
  source 1..711: mol_type = other DNA

SEQ ID NO: 2068 - DNA, 711 bp, synthetic construct
  misc_feature 1..711: note = Description of Artificial Sequence: Synthetic construct
  source 1..711: mol_type = other DNA
atcacgtgccctccccccatgtccgtggaacacgcagacatctgggtcaagagctacagcttgtactccagggagcggtacatttgtaactctggtttcaagcgtaaagccggcacgtccagcctgacggagtgcgtgttgaacaaggccacgaatgtcgcccactggacaacccccagtctcaaatgcattagagaccctgccctggttcaccaaaggccagcgccaccctccacagtaacgacggcaggggtgaccccacagccagagagcctctccccttctggaaaagagcccgcagcttcatctcccagctcaaacaacacagcggccacaacagcagctattgtcccgggctcccagctgatgccttcaaaatcaccttccacaggaaccacagagataagcagtcatgagtcctcccacggcaccccctctcagacaacagccaagaactgggaactcacagcatccgcctcccaccagccgccaggtgtgtatccacagggccacagcgacaccactgtggctatctccacgtccactgtcctgctgtgtgggctgagcgctgtgtctctcctggcatgctacctcaagtcaaggcaaactcccccgctggccagcgttgaaatggaagccatggaggctctgccggtgacttgggggaccagcagcagagatgaagacttggaaaactgctctcaccaccta

SEQ ID NO: 2069 - DNA, 711 bp, synthetic construct; identical to SEQ ID NO: 1624
  misc_feature 1..711: note = Description of Artificial Sequence: Synthetic construct
  source 1..711: mol_type = other DNA

SEQ ID NO: 2070 - DNA, 711 bp, synthetic construct
  misc_feature 1..711: note = Description of Artificial Sequence: Synthetic construct
  source 1..711: mol_type = other DNA
attacatgccctcctccaatgtctgtggagcacgccgatatttgggtgaagtcctacagcctgtacagcagagagagatacatctgcaacagcggctttaagagaaaggccggcacctcttctctgacagagtgcgtgctgaataaggccacaaatgtggcccactggacaacacctagcctgaagtgcattagagatcctgccctggtccaccagaggcctgcccctccatctacagtgacaacagccggagtgacacctcagcctgaatctctgagcccttctggaaaagaacctgccgccagctctcctagctctaataataccgccgccacaacagccgccattgtgcctggatctcagctgatgcctagcaagtctcctagcacaggcacaacagagatcagcagccacgaatcttctcacggaacaccttctcagaccaccgccaagaattgggagctgacagcctctgcctctcaccagcctccaggagtgtatcctcagggccactctgatacaacagtggccatcagcacatctacagtgctgctgtgtggactgtctgccgtgtctctgctggcctgttacctgaagtctagacagacacctcctctggcctctgtggagatggaggccatggaagccctgcctgtgacatggggaacaagcagcagagatgaggacctggagaattgttctcaccacctg

SEQ ID NO: 2071 - DNA, 525 bp, synthetic construct; identical to SEQ ID NO: 1938
  misc_feature 1..525: note = Description of Artificial Sequence: Synthetic construct
  source 1..525: mol_type = other DNA

SEQ ID NO: 2072 - protein, 235 aa, synthetic construct; identical to SEQ ID NO: 1939
  REGION 1..235: note = Description of Artificial Sequence: Synthetic construct

SEQ ID NO: 2073 - DNA, 708 bp, synthetic construct; identical to SEQ ID NO: 1940
  misc_feature 1..708: note = Description of Artificial Sequence: Synthetic construct
  source 1..708: mol_type = other DNA

SEQ ID NO: 2074 - protein, 8 aa, synthetic construct
  REGION 1..8: note = Description of Artificial Sequence: Synthetic Flag sequence
DYKDDDDK

SEQ ID NO: 2075 - DNA, 24 bp, synthetic construct
  misc_feature 1..24: note = Description of Artificial Sequence: Synthetic Flag sequence
  source 1..24: mol_type = other DNA
gactacaaagacgatgacgacaag

SEQ ID NO: 2076 - skipped

SEQ ID NO: 2077 - protein, 158 aa, synthetic construct; identical to SEQ ID NO: 1175
  REGION 1..158: note = Description of Artificial Sequence: Synthetic Destabilizing Domain (DD)

SEQ ID NO: 2078 - DNA, 477 bp, synthetic construct; identical to SEQ ID NO: 1682
  misc_feature 1..477: note = Description of Artificial Sequence: Synthetic Destabilizing Domain (DD)
  source 1..477: mol_type = other DNA

SEQ ID NO: 2079 - DNA, 474 bp, synthetic construct; identical to SEQ ID NO: 1683
  misc_feature 1..474: note = Description of Artificial Sequence: Synthetic Destabilizing Domain (DD)
  source 1..474: mol_type = other DNA

SEQ ID NO: 2080 - protein, 107 aa, synthetic construct; identical to SEQ ID NO: 1177
  REGION 1..107: note = Description of Artificial Sequence: Synthetic Destabilizing Domain (DD)

SEQ ID NO: 2081 - DNA, 324 bp, synthetic construct; identical to SEQ ID NO: 1669
  misc_feature 1..324: note = Description of Artificial Sequence: Synthetic Destabilizing Domain (DD)
  source 1..324: mol_type = other DNA

SEQ ID NO: 2082 - DNA, 324 bp, synthetic construct; identical to SEQ ID NO: 1670
  misc_feature 1..324: note = Description of Artificial Sequence: Synthetic Destabilizing Domain (DD)
  source 1..324: mol_type = other DNA

SEQ ID NO: 2083 - DNA, 324 bp, synthetic construct; identical to SEQ ID NO: 1671
  misc_feature 1..324: note = Description of Artificial Sequence: Synthetic Destabilizing Domain (DD)
  source 1..324: mol_type = other DNA

SEQ ID NO: 2084 - DNA, 324 bp, synthetic construct; identical to SEQ ID NO: 1672
  misc_feature 1..324: note = Description of Artificial Sequence: Synthetic Destabilizing Domain (DD)
  source 1..324: mol_type = other DNA

SEQ ID NO: 2085 - protein, 186 aa, synthetic construct; identical to SEQ ID NO: 41
  REGION 1..186: note = Description of Artificial Sequence: Synthetic Destabilizing Domain (DD)

SEQ ID NO: 2086 - DNA, 561 bp, synthetic construct; identical to SEQ ID NO: 77
  misc_feature 1..561: note = Description of Artificial Sequence: Synthetic Destabilizing Domain (DD)
  source 1..561: mol_type = other DNA

SEQ ID NO: 2087 - DNA, 558 bp, synthetic construct; identical to SEQ ID NO: 1689
  misc_feature 1..558: note = Description of Artificial Sequence: Synthetic Destabilizing Domain (DD)
  source 1..558: mol_type = other DNA

SEQ ID NO: 2088 - DNA, 561 bp, synthetic construct; identical to SEQ ID NO: 1688
  misc_feature 1..561: note = Description of Artificial Sequence: Synthetic Destabilizing Domain (DD)
  source 1..561: mol_type = other DNA

SEQ ID NO: 2089 - protein, 186 aa, synthetic construct; identical to SEQ ID NO: 56
  REGION 1..186: note = Description of Artificial Sequence: Synthetic Destabilizing Domain (DD)

SEQ ID NO: 2090 - DNA, 561 bp, synthetic construct; identical to SEQ ID NO: 85
  misc_feature 1..561: note = Description of Artificial Sequence: Synthetic Destabilizing Domain (DD)
  source 1..561: mol_type = other DNA

SEQ ID NO: 2091 - DNA, 558 bp, synthetic construct; identical to SEQ ID NO: 1695
  misc_feature 1..558: note = Description of Artificial Sequence: Synthetic Destabilizing Domain (DD)
  source 1..558: mol_type = other DNA

SEQ ID NO: 2092 - DNA, 561 bp, synthetic construct; identical to SEQ ID NO: 1694
  misc_feature 1..561: note = Description of Artificial Sequence: Synthetic Destabilizing Domain (DD)
  source 1..561: mol_type = other DNA

SEQ ID NO: 2093 - protein, 186 aa, synthetic construct; identical to SEQ ID NO: 1251
  REGION 1..186: note = Description of Artificial Sequence: Synthetic Destabilizing Domain (DD)

SEQ ID NO: 2094 - DNA, 558 bp, synthetic construct; identical to SEQ ID NO: 1943
  misc_feature 1..558: note = Description of Artificial Sequence: Synthetic Destabilizing Domain (DD)
  source 1..558: mol_type = other DNA

SEQ ID NO: 2095 - protein, 186 aa, synthetic construct; identical to SEQ ID NO: 1250
  REGION 1..186: note = Description of Artificial Sequence: Synthetic Destabilizing Domain (DD)

SEQ ID NO: 2096 - DNA, 561 bp, synthetic construct; identical to SEQ ID NO: 1944
  misc_feature 1..561: note = Description of Artificial Sequence: Synthetic Destabilizing Domain (DD)
  source 1..561: mol_type = other DNA

SEQ ID NO: 2097 - DNA, 561 bp, synthetic construct; identical to SEQ ID NO: 1944
  misc_feature 1..561: note = Description of Artificial Sequence: Synthetic Destabilizing Domain (DD)
  source 1..561: mol_type = other DNA

SEQ ID NO: 2098 - protein, 186 aa, synthetic construct; identical to SEQ ID NO: 1254
  REGION 1..186: note = Description of Artificial Sequence: Synthetic Destabilizing Domain (DD)

SEQ ID NO: 2099 - DNA, 558 bp, synthetic construct; identical to SEQ ID NO: 1946
  misc_feature 1..558: note = Description of Artificial Sequence: Synthetic Destabilizing Domain (DD)
  source 1..558: mol_type = other DNA

SEQ ID NO: 2100 - protein, 186 aa, synthetic construct; identical to SEQ ID NO: 1256
  REGION 1..186: note = Description of Artificial Sequence: Synthetic Destabilizing Domain (DD)

SEQ ID NO: 2101 - DNA, 558 bp, synthetic construct; identical to SEQ ID NO: 1820
  misc_feature 1..558: note = Description of Artificial Sequence: Synthetic Destabilizing Domain (DD)
  source 1..558: mol_type = other DNA

SEQ ID NO: 2102 - protein, 186 aa, synthetic construct; identical to SEQ ID NO: 33
  REGION 1..186: note = Description of Artificial Sequence: Synthetic Destabilizing Domain (DD)

SEQ ID NO: 2103 - DNA, 558 bp, synthetic construct; identical to SEQ ID NO: 126
  misc_feature 1..558: note = Description of Artificial Sequence: Synthetic Destabilizing Domain (DD)
  source 1..558: mol_type = other DNA

SEQ ID NO: 2104 - protein, 186 aa, synthetic construct; identical to SEQ ID NO: 1255
  REGION 1..186: note = Description of Artificial Sequence: Synthetic Destabilizing Domain (DD)

SEQ ID NO: 2105 - DNA, 558 bp, synthetic construct; identical to SEQ ID NO: 1948
  misc_feature 1..558: note = Description of Artificial Sequence: Synthetic Destabilizing Domain (DD)
  source 1..558: mol_type = other DNA

SEQ ID NO: 2106 - protein, 555 aa, synthetic construct; identical to SEQ ID NO: 1949
  REGION 1..555: note = Description of Artificial Sequence: Synthetic polypeptide

SEQ ID NO: 2107 - DNA, 1668 bp, synthetic construct
  misc_feature 1..1668: note = Description of Artificial Sequence: Synthetic polynucleotide
  source 1..1668: mol_type = other DNA
atggactggacatggatactcttcctggtagcagccgccacacgagtgcacagcaactgggtgaacgtgatctccgacctgaaaaagatcgaggatttgatccagagcatgcacattgacgccaccctgtataccgagtccgacgtgcacccgagttgcaaggtgactgccatgaagtgcttcctgctggagctgcaagtgatcagcctggagagcggcgacgccagcatccacgacaccgtggaaaaccttatcattctggccaacaatagcctgagcagcaacggcaacgtgaccgaaagcggatgtaaggaatgcgaggaactggaagagaagaatatcaaagaattcctgcaaagcttcgtgcacatcgtgcagatgttcatcaacacttcttcaggtggcggtagtggtgggggaggatctggaggcggaggaagcgggggtggaggttcaggaggagggagcttgcaaattacctgcccccctccgatgagcgtggagcacgccgacatctgggtcaagagctacagcttgtatagtagggagcggtacatctgtaacagcgggttcaagaggaaggccgggaccagctcactgaccgagtgcgtgttgaacaaggccaccaacgtggcccactggaccacccctagccttaagtgcatcagggacccagcgctcgtacaccagagacccgcgcctccctctacggtaaccacggcaggcgtaaccccccagcccgagagcctgtccccgagcggcaaggagcctgcagcgagcagcccctcaagcaacaacacagccgctaccaccgcggcaatcgtgcccggcagccagctgatgccctcaaagagccccagcaccggcaccactgagataagcagccacgagagctcacacggcactccctcacagaccactgccaagaattgggagctgaccgcctctgccagccaccagcccccaggcgtgtatccccagggccacagcgacaccacggtcgccatcagcacatctacagtgcttttgtgcggccttagcgccgtgtcactgctggcatgctacttgaaaagtaggcaaactccccctcttgccagtgtggaaatggaggccatggaagccctgcccgtgacctggggcaccagttctagggacgaggaccttgagaactgctcacatcatttgagcggcatctctctgattgcggcgctggcagttgaccacgttattggcatggaaaacgcgatgccatggaacctcccggctgacctggcgtggttcaaacgtaacaccctgaacaaacctgtgatcatgggtcgtcacacctgggaatctattggccgtcctctcccgggtcgtaaaaacatcattctgtcttctcagccaggcaccgacgaccgtgttacctgggttaaaagcgttgacgaagcgattgctgcgtgcggtgatgttcctgaaattatggtgatcggcggtggccgtgtttacgaacagttcctgccgaaagcgcagaaactgtacctgacccacatcgacgcggaagttgaaggtgacacccacttcccggactacaaaccggatgattgggagagcgtattctccgaattccatgatgcggatgcgcaaaactctcattcttactgttttgaaatcctggaacgtcgttga

SEQ ID NO: 2108 - protein, 504 aa, synthetic construct; identical to SEQ ID NO: 1951
  REGION 1..504: note = Description of Artificial Sequence: Synthetic polypeptide

SEQ ID NO: 2109 - DNA, 1515 bp, synthetic construct; identical to SEQ ID NO: 1952
  misc_feature 1..1515: note = Description of Artificial Sequence: Synthetic polynucleotide
  source 1..1515: mol_type = other DNA

SEQ ID NO: 2110 - protein, 395 aa, synthetic construct [sequence omitted]

SEQ ID NO: 2111 - DNA, 1188 bp, synthetic construct; identical to SEQ ID NO: 169
  misc_feature 1..1188: note = Description of Artificial Sequence: Synthetic polynucleotide
  source 1..1188: mol_type = other DNA

SEQ ID NO: 2112 - protein, 555 aa, synthetic construct; identical to SEQ ID NO: 1955
  REGION 1..555: note = Description of Artificial Sequence: Synthetic polypeptide

SEQ ID NO: 2113 - DNA, 1668 bp, synthetic construct; identical to SEQ ID NO: 1956
  misc_feature 1..1668: note = Description of Artificial Sequence: Synthetic polynucleotide
  source 1..1668: mol_type = other DNA

SEQ ID NO: 2114 - protein, 583 aa, synthetic construct; identical to SEQ ID NO: 1957
  REGION 1..583: note = Description of Artificial Sequence: Synthetic polypeptide

SEQ ID NO: 2115 - DNA, 1752 bp, synthetic construct; identical to SEQ ID NO: 170
  misc_feature 1..1752: note = Description of Artificial Sequence: Synthetic polynucleotide
  source 1..1752: mol_type = other DNA

SEQ ID NO: 2116 - protein, 583 aa, synthetic construct; identical to SEQ ID NO: 1959
  REGION 1..583: note = Description of Artificial Sequence: Synthetic polypeptide

SEQ ID NO: 2117 - DNA, 1752 bp, synthetic construct; identical to SEQ ID NO: 171
  misc_feature 1..1752: note = Description of Artificial Sequence: Synthetic polynucleotide
  source 1..1752: mol_type = other DNA

SEQ ID NO: 2118 - protein, 583 aa, synthetic construct; identical to SEQ ID NO: 1961
  REGION 1..583: note = Description of Artificial Sequence: Synthetic construct

SEQ ID NO: 2119 - DNA, 1752 bp, synthetic construct; identical to SEQ ID NO: 1962
  misc_feature 1..1752: note = Description of Artificial Sequence: Synthetic construct
  source 1..1752: mol_type = other DNA

SEQ ID NO: 2120 - protein, 583 aa, synthetic construct; identical to SEQ ID NO: 1963
  REGION 1..583: note = Description of Artificial Sequence: Synthetic construct

SEQ ID NO: 2121 - DNA, 1752 bp, synthetic construct; identical to SEQ ID NO: 1964
  misc_feature 1..1752: note = Description of Artificial Sequence: Synthetic construct
  source 1..1752: mol_type = other DNA

SEQ ID NO: 2122 - protein, 583 aa, synthetic construct; identical to SEQ ID NO: 1965
  REGION 1..583: note = Description of Artificial Sequence: Synthetic construct

SEQ ID NO: 2123 - DNA, 1752 bp, synthetic construct; identical to SEQ ID NO: 1966
  misc_feature 1..1752: note = Description of Artificial Sequence: Synthetic construct
  source 1..1752: mol_type = other DNA

SEQ ID NO: 2124 - protein, 404 aa, synthetic construct; identical to SEQ ID NO: 1967
  REGION 1..404: note = Description of Artificial Sequence: Synthetic construct

SEQ ID NO: 2125 - DNA, 1215 bp, synthetic construct; identical to SEQ ID NO: 1968
  misc_feature 1..1215: note = Description of Artificial Sequence: Synthetic construct
  source 1..1215: mol_type = other DNA

SEQ ID NO: 2126 - protein, 403 aa, synthetic construct; identical to SEQ ID NO: 1969
  REGION 1..403: note = Description of Artificial Sequence: Synthetic construct

SEQ ID NO: 2127 - DNA, 1212 bp, synthetic construct; identical to SEQ ID NO: 1970
  misc_feature 1..1212: note = Description of Artificial Sequence: Synthetic construct
  source 1..1212: mol_type = other DNA

SEQ ID NO: 2128 - protein, 403 aa, synthetic construct; identical to SEQ ID NO: 1971
  REGION 1..403: note = Description of Artificial Sequence: Synthetic construct

SEQ ID NO: 2129 - DNA, 1212 bp, synthetic construct; identical to SEQ ID NO: 1972
  misc_feature 1..1212: note = Description of Artificial Sequence: Synthetic construct
  source 1..1212: mol_type = other DNA

SEQ ID NO: 2130 - protein, 371 aa, synthetic construct; identical to SEQ ID NO: 1973
  REGION 1..371: note = Description of Artificial Sequence: Synthetic construct

SEQ ID NO: 2131 - DNA, 1116 bp, synthetic construct; identical to SEQ ID NO: 1974
  misc_feature 1..1116: note = Description of Artificial Sequence: Synthetic construct
  source 1..1116: mol_type = other DNA

SEQ ID NO: 2132 - protein, 407 aa, synthetic construct; identical to SEQ ID NO: 1975
  REGION 1..407: note = Description of Artificial Sequence: Synthetic construct

SEQ ID NO: 2133 - DNA, 1224 bp, synthetic construct; identical to SEQ ID NO: 1976
  misc_feature 1..1224: note = Description of Artificial Sequence: Synthetic construct
  source 1..1224: mol_type = other DNA

SEQ ID NO: 2134 - protein, 397 aa, synthetic construct; identical to SEQ ID NO: 1977
  REGION 1..397: note = Description of Artificial Sequence: Synthetic construct

SEQ ID NO: 2135 - DNA, 1194 bp, synthetic construct; identical to SEQ ID NO: 1978
  misc_feature 1..1194: note = Description of Artificial Sequence: Synthetic construct
  source 1..1194: mol_type = other DNA

SEQ ID NO: 2136 - protein, 555 aa, synthetic construct; identical to SEQ ID NO: 1955
  REGION 1..555: note = Description of Artificial Sequence: Synthetic construct

SEQ ID NO: 2137 - DNA, 1668 bp, synthetic construct; identical to SEQ ID NO: 1980
  misc_feature 1..1668: note = Description of Artificial Sequence: Synthetic construct
  source 1..1668: mol_type = other DNA

SEQ ID NO: 2138 - protein, 407 aa, synthetic construct; identical to SEQ ID NO: 1975
  REGION 1..407: note = Description of Artificial Sequence: Synthetic construct

SEQ ID NO: 2139 - DNA, 1224 bp, synthetic construct; identical to SEQ ID NO: 1976
  misc_feature 1..1224: note = Description of Artificial Sequence: Synthetic construct
  source 1..1224: mol_type = other DNA

SEQ ID NO: 2140 - protein, 371 aa, synthetic construct
  REGION 1..371: note = Description of Artificial Sequence: Synthetic construct
MDWTWILFLVAAATRVHSNWVNVISDLKKIEDLIQSMHIDATLYTESDVHPSCKVTAMKCFLLELQVISLESGDASIHDTVENLIILANNSLSSNGNVTESGCKECEELEEKNIKEFLQSFVHIVQMFINTSGSITCPPPMSVEHADIWVKSYSLYSRERYICNSGFKRKAGTSSLTECVLNKATNVAHWTTPSLKCIRDPALVHQRPAPPSTVTTAGVTPQPESLSPSGKEPAASSPSSNNTAATTAAIVPGSQLMPSKSPSTGTTEISSHESSHGTPSQTTAKNWELTASASHQPPGVYPQGHSDTTVAISTSTVLLCGLSAVSLLACYLKSRQTPPLASVEMEAMEALPVTWGTSSRDEDLENCSHHL

SEQ ID NO: 2141 - DNA, 1116 bp, synthetic construct
  misc_feature 1..1116: note = Description of Artificial Sequence: Synthetic construct
  source 1..1116: mol_type = other DNA
atggactggacatggatactcttcctggtagcagccgccacacgagtgcacagcaactgggtgaacgtgatctccgacctgaaaaagatcgaggatttgatccagagcatgcacattgacgccaccctgtataccgagtccgacgtgcacccgagttgcaaggtgactgccatgaagtgcttcctgctggagctgcaagtgatcagcctggagagcggcgacgccagcatccacgacaccgtggaaaaccttatcattctggccaacaatagcctgagcagcaacggcaacgtgaccgaaagcggatgtaaggaatgcgaggaactggaagagaagaatatcaaagaattcctgcaaagcttcgtgcacatcgtgcagatgttcatcaacacttctggatccattacctgcccccctccgatgagcgtggagcacgccgacatctgggtcaagagctacagcttgtatagtagggagcggtacatctgtaacagcgggttcaagaggaaggccgggaccagctcactgaccgagtgcgtgttgaacaaggccaccaacgtggcccactggaccacccctagccttaagtgcatcagggacccagcgctcgtacaccagagacccgcgcctccctctacggtaaccacggcaggcgtaaccccccagcccgagagcctgtccccgagcggcaaggagcctgcagcgagcagcccctcaagcaacaacacagccgctaccaccgcggcaatcgtgcccggcagccagctgatgccctcaaagagccccagcaccggcaccactgagataagcagccacgagagctcacacggcactccctcacagaccactgccaagaattgggagctgaccgcctctgccagccaccagcccccaggcgtgtatccccagggccacagcgacaccacggtcgccatcagcacatctacagtgcttttgtgcggccttagcgccgtgtcactgctggcatgctacttgaaaagtaggcaaactccccctcttgccagtgtggaaatggaggccatggaagccctgcccgtgacctggggcaccagttctagggacgaggaccttgagaactgctcacatcatttgtga

SEQ ID NO: 2142 - DNA, 1224 bp, synthetic construct; identical to SEQ ID NO: 1982
  misc_feature 1..1224: note = Description of Artificial Sequence: Synthetic construct
  source 1..1224: mol_type = other DNA

SEQ ID NO: 2143 - DNA, 1128 bp, synthetic construct
  misc_feature 1..1128: note = Description of Artificial Sequence: Synthetic construct
  source 1..1128: mol_type = other DNA
atggactggacctggattctgtttctggtggccgctgccacaagagtgcacagcaattgggtcaacgtgatcagcgacctgaagaagatcgaggacctgatccagagcatgcacatcgacgccacactgtacaccgagtccgatgtgcaccctagctgcaaagtgaccgccatgaagtgctttctgctggaactgcaagtgatcagcctggaaagcggcgacgccagcatccacgataccgtggaaaatctgatcatcctggccaacaacagcctgagcagcaacggcaatgtgaccgagagcggctgcaaagagtgcgaggaactggaagagaagaacatcaaagagttcctccagagcttcgtccacatcgtgcagatgttcatcaacaccagctctggcggaggaagcggaggcggaggatctggtggtggtggatctggcggcggtggtagtggcggaggttctctgcaaatcacctgtcctccacctatgagcgtggaacacgccgacatctgggtcaagagctacagcctgtacagcagagagcggtacatctgcaacagcggcttcaagagaaaggccggcacaagcagcctgaccgagtgtgtgctgaacaaggccacaaacgtggcccactggaccacacctagcctgaagtgcatcagagatcccgctctggttcaccagaggcctgctcctccatctacagtgacaacagctggcgtgacccctcagcctgagtctctgtctccatctggaaaagagcctgccgccagctctcccagctctaacaatactgctgccaccacagccgccatcgtgcctggatctcagctgatgcctagcaagagccctagcaccggcacaacagagatcagctctcacgagtctagccacggcaccccatctcagaccacagccaagaattgggagctgaccgcctctgcctctcatcagccacctggtgtttaccctcaaggccactctgataccaccgtggccatcagcacaagcacagtgctgctgtgtggactgtctgccgtgtctctgctggcctgctacctgaagtctagacagacacctcctctggccagcgtggaaatggaagccatggaagctctgcct

SEQ ID NO: 2144 - protein, 573 aa, synthetic construct; identical to SEQ ID NO: 1984
  REGION 1..573: note = Description of Artificial Sequence: Synthetic construct

SEQ ID NO: 2145 - DNA, 1722 bp, synthetic construct; identical to SEQ ID NO: 1985
  misc_feature 1..1722: note = Description of Artificial Sequence: Synthetic construct
  source 1..1722: mol_type = other DNA

SEQ ID NO: 2146 - protein, 414 aa, synthetic construct; identical to SEQ ID NO: 1986
  REGION 1..414: note = Description of Artificial Sequence: Synthetic construct

SEQ ID NO: 2147 - DNA, 1245 bp, synthetic construct; identical to SEQ ID NO: 1987
  misc_feature 1..1245: note = Description of Artificial Sequence: Synthetic construct
  source 1..1245: mol_type = other DNA

SEQ ID NO: 2148 - protein, 600 aa, synthetic construct
  REGION 1..600: note = Description of Artificial Sequence: Synthetic construct
MDWTWILFLVAAATRVHSDYKDDDDKNWVNVISDLKKIEDLIQSMHIDATLYTESDVHPSCKVTAMKCFLLELQVISLESGDASIHDTVENLIILANNSLSSNGNVTESGCKECEELEEKNIKEFLQSFVHIVQMFINTSSGGGSGGGGSGGGGSGGGGSGGGSLQYPYDVPDYAITCPPPMSVEHADIWVKSYSLYSRERYICNSGFKRKAGTSSLTECVLNKATNVAHWTTPSLKCIRDPALVHQRPAPPSTVTTAGVTPQPESLSPSGKEPAASSPSSNNTAATTAAIVPGSQLMPSKSPSTGTTEISSHESSHGTPSQTTAKNWELTASASHQPPGVYPQGHSDTTVAISTSTVLLCGLSAVSLLACYLKSRQTPPLASVEMEAMEALPVTWGTSSRDEDLENCSHHLGSGVGSLNCIVAVSQNMGIGKNGDLPWPPLRNEFRYFQRMTTTSSVEGKQNLVIMGKKTWFSIPEKNRPLKGRINLVLSRELKEPPQGAHFLSRSLDDALKLTEQPELANKVDMVWIVGGSSVYKEAMNHPGHLKLFVTRIMQDFESDTFFPEIDLEKYKLLPEYPGVLSDVQEEKGIKYKFEVYEEN

SEQ ID NO: 2149 - DNA, 1806 bp, synthetic construct; identical to SEQ ID NO: 1989
  misc_feature 1..1806: note = Description of Artificial Sequence: Synthetic construct
  source 1..1806: mol_type = other DNA

SEQ ID NO: 2150 - protein, 601 aa, synthetic construct; identical to SEQ ID NO: 1990
  REGION 1..601: note = Description of Artificial Sequence: Synthetic construct

SEQ ID NO: 2151 - DNA, 1806 bp, synthetic construct; identical to SEQ ID NO: 1991
  misc_feature 1..1806: note = Description of Artificial Sequence: Synthetic construct
  source 1..1806: mol_type = other DNA

SEQ ID NO: 2152 - protein, 601 aa, synthetic construct; identical to SEQ ID NO: 1992
  REGION 1..601: note = Description of Artificial Sequence: Synthetic construct

SEQ ID NO: 2153 - DNA, 1806 bp, synthetic construct; identical to SEQ ID NO: 1993
  misc_feature 1..1806: note = Description of Artificial Sequence: Synthetic construct
  source 1..1806: mol_type = other DNA

SEQ ID NO: 2154 - protein, 601 aa, synthetic construct; identical to SEQ ID NO: 1994
  REGION 1..601: note = Description of Artificial Sequence: Synthetic construct

SEQ ID NO: 2155 - DNA, 1806 bp, synthetic construct; identical to SEQ ID NO: 1995
  misc_feature 1..1806: note = Description of Artificial Sequence: Synthetic construct
  source 1..1806: mol_type = other DNA

SEQ ID NO: 2156 - protein, 601 aa, synthetic construct; identical to SEQ ID NO: 1996
  REGION 1..601: note = Description of Artificial Sequence: Synthetic construct

SEQ ID NO: 2157 - DNA, 1806 bp, synthetic construct; identical to SEQ ID NO: 1997
  misc_feature 1..1806: note = Description of Artificial Sequence: Synthetic construct
  source 1..1806: mol_type = other DNA

SEQ ID NO: 2158 - protein, 601 aa, synthetic construct; identical to SEQ ID NO: 1998
  REGION 1..601: note = Description of Artificial Sequence: Synthetic construct

SEQ ID NO: 2159 - DNA, 1806 bp, synthetic construct; identical to SEQ ID NO: 1999
  misc_feature 1..1806: note = Description of Artificial Sequence: Synthetic construct
  source 1..1806: mol_type = other DNA

SEQ ID NO: 2160 - protein, 681 aa, synthetic construct; identical to SEQ ID NO: 2000
  REGION 1..681: note = Description of Artificial Sequence: Synthetic construct

SEQ ID NO: 2161 - DNA, 2046 bp, synthetic construct; identical to SEQ ID NO: 2001
  misc_feature 1..2046: note = Description of Artificial Sequence: Synthetic construct
  source 1..2046: mol_type = other DNA

SEQ ID NO: 2162 - protein, 652 aa, synthetic construct; identical to SEQ ID NO: 2002
  REGION 1..652: note = Description of Artificial Sequence: Synthetic construct

SEQ ID NO: 2163 - DNA, 1959 bp, synthetic construct; identical to SEQ ID NO: 2003
  misc_feature 1..1959: note = Description of Artificial Sequence: Synthetic construct
  source 1..1959: mol_type = other DNA

SEQ ID NO: 2164 - protein, 320 aa, synthetic construct; identical to SEQ ID NO: 2004
  REGION 1..320: note = Description of Artificial Sequence: Synthetic construct

SEQ ID NO: 2165 - protein, 14 aa, synthetic construct
  REGION 1..14: note = Description of Artificial Sequence: Synthetic construct
YDSLEIPPLSLPPP

SEQ ID NO: 2166 - protein, 43 aa, synthetic construct; identical to SEQ ID NO: 697
  REGION 1..43: note = Description of Artificial Sequence: Synthetic construct

SEQ ID NO: 2167 - protein, 102 aa, synthetic construct; identical to SEQ ID NO: 698
  REGION 1..102: note = Description of Artificial Sequence: Synthetic construct

SEQ ID NO: 2168 - protein, 41 aa, synthetic construct; identical to SEQ ID NO: 699
  REGION 1..41: note = Description of Artificial Sequence: Synthetic construct

SEQ ID NO: 2169 - protein, 24 aa, synthetic construct
  REGION 1..24: note = Description of Artificial Sequence: Synthetic construct
ARARRITWPSSRSSCASRCTWRAP

SEQ ID NO: 2170 - protein, 23 aa, synthetic construct
  REGION 1..23: note = Description of Artificial Sequence: Synthetic construct
TATSSRSRARARAAPTRAPRPPS

SEQ ID NO: 2171 - protein, 24 aa, synthetic construct
  REGION 1..24: note = Description of Artificial Sequence: Synthetic construct
PRVAPCPSPGTSCPLSSCTAPRPT

SEQ ID NO: 2172 - protein, 9 aa, synthetic construct
  REGION 1..9: note = Description of Artificial Sequence: Synthetic construct
STPPTSPTT

SEQ ID NO: 2173 - protein, 12 aa, synthetic construct
  REGION 1..12: note = Description of Artificial Sequence: Synthetic construct
SCPSPRASSGSA

SEQ ID NO: 2174 - protein, 7 aa, synthetic construct
  REGION 1..7: note = Description of Artificial Sequence: Synthetic construct
TSRTAAW

SEQ ID NO: 2175 - protein, 14 aa, synthetic construct
  REGION 1..14: note = Description of Artificial Sequence: Synthetic construct
PRTPPCRTASSSTR

SEQ ID NO: 2176 - protein, 12 aa, synthetic construct
  REGION 1..12: note = Description of Artificial Sequence: Synthetic construct
SCAAPTSPPTAP

SEQ ID NO: 2177 - protein, 21 aa, synthetic construct
  REGION 1..21: note = Description of Artificial Sequence: Synthetic construct
CRRRPWAGRPPPSGCTPRTAP

SEQ ID NO: 2178 - protein, 7 aa, synthetic construct
  REGION 1..7: note = Description of Artificial Sequence: Synthetic construct
RARSSRG

SEQ ID NO: 2179 - protein, 64 aa, synthetic construct; identical to SEQ ID NO: 710
  REGION 1..64: note = Description of Artificial Sequence: Synthetic construct

SEQ ID NO: 2180 - DNA, 2291 bp, synthetic construct; identical to SEQ ID NO: 2020
  misc_feature 1..2291: note = Description of Artificial Sequence: Synthetic construct
  source 1..2291: mol_type = other DNA

SEQ ID NO: 2181 - DNA, 2291 bp, synthetic construct; identical to SEQ ID NO: 2020
  misc_feature 1..2291: note = Description of Artificial Sequence: Synthetic construct
  source 1..2291: mol_type = other DNA

SEQ ID NO: 2182 - protein, 320 aa, synthetic construct; identical to SEQ ID NO: 2004
  REGION 1..320: note = Description of Artificial Sequence: Synthetic construct

SEQ ID NO: 2183 - DNA, 963 bp, synthetic construct; identical to SEQ ID NO: 2022
  misc_feature 1..963: note = Description of Artificial Sequence: Synthetic construct
  source 1..963: mol_type = other DNA

SEQ ID NO: 2184 - protein, 235 aa, synthetic construct; identical to SEQ ID NO: 1939
  REGION 1..235: note = Description of Artificial Sequence: Synthetic construct

SEQ ID NO: 2185 - DNA, 708 bp, synthetic construct; identical to SEQ ID NO: 1940
  misc_feature 1..708: note = Description of Artificial Sequence: Synthetic construct
  source 1..708: mol_type = other DNA

SEQ ID NO: 2186 - protein, 134 aa, synthetic construct; identical to SEQ ID NO: 2025
  REGION 1..134: note = Description of Artificial Sequence: Synthetic construct

SEQ ID NO: 2187 - protein, 7 aa, synthetic construct
  REGION 1..7: note = Description of Artificial Sequence: Synthetic construct
NLDNTTH

SEQ ID NO: 2188 - protein, 19 aa, synthetic construct
  REGION 1..19: note = Description of Artificial Sequence: Synthetic construct
RSRPSPSPPPNVTGRSRLE

SEQ ID NO: 2189 - protein, 60 aa, synthetic construct; identical to SEQ ID NO: 2028
  REGION 1..60: note = Description of Artificial Sequence: Synthetic construct

SEQ ID NO: 2190 - protein, 29 aa, synthetic construct
  REGION 1..29: note = Description of Artificial Sequence: Synthetic construct
RQTTSVATLCRQRNPPPGDRCLCGQKPRV

SEQ ID NO: 2191 - protein, 58 aa, synthetic construct; identical to SEQ ID NO: 2030
  REGION 1..58: note = Description of Artificial Sequence: Synthetic construct

SEQ ID NO: 2192 - protein, 18 aa, synthetic construct
  REGION 1..18: note = Description of Artificial Sequence: Synthetic construct
SRLKKRLGPPNHGDVVFL

SEQ ID NO: 2193 - protein, 12 aa, synthetic construct
  REGION 1..12: note = Description of Artificial Sequence: Synthetic construct
YGHNHDEQGRGG

SEQ ID NO: 2194 - protein, 171 aa, synthetic construct; identical to SEQ ID NO: 2033
  REGION 1..171: note = Description of Artificial Sequence: Synthetic construct

SEQ ID NO: 2195 - protein, 56 aa, synthetic construct; identical to SEQ ID NO: 2034
  REGION 1..56: note = Description of Artificial Sequence: Synthetic construct

SEQ ID NO: 2196 - DNA, 1735 bp, synthetic construct; identical to SEQ ID NO: 2035
  misc_feature 1..1735: note = Description of Artificial Sequence: Synthetic construct
  source 1..1735: mol_type = other DNA

SEQ ID NO: 2197 - protein, 134 aa, synthetic construct; identical to SEQ ID NO: 2025
  REGION 1..134: note = Description of Artificial Sequence: Synthetic construct

SEQ ID NO: 2198 - DNA, 405 bp, synthetic construct; identical to SEQ ID NO: 2037
  misc_feature 1..405: note = Description of Artificial Sequence: Synthetic construct
  source 1..405: mol_type = other DNA

SEQ ID NO: 2199 - protein, 20 aa, Homo sapiens
MYRMQLLSCIALSLALVTNS

SEQ ID NO: 2200 - DNA, 60 bp, Homo sapiens; identical to SEQ ID NO: 1777
  source 1..60: mol_type = other DNA

SEQ ID NO: 2201 - DNA, 60 bp, synthetic construct; identical to SEQ ID NO: 1776
  misc_feature 1..60: note = Description of Artificial Sequence: Synthetic signal sequence
  source 1..60: mol_type = other DNA

SEQ ID NO: 2202 - DNA, 60 bp, synthetic construct; identical to SEQ ID NO: 1778
  misc_feature 1..60: note = Description of Artificial Sequence: Synthetic signal sequence
  source 1..60: mol_type = other DNA

SEQ ID NO: 2203 - DNA, 60 bp, synthetic construct; identical to SEQ ID NO: 1779
  misc_feature 1..60: note = Description of Artificial Sequence: Synthetic signal sequence
  source 1..60: mol_type = other DNA

SEQ ID NO: 2204 - protein, 18 aa, Homo sapiens
MDWTWILFLVAAATRVHS

SEQ ID NO: 2205 - DNA, 54 bp, Homo sapiens; identical to SEQ ID NO: 1850
  source 1..54: mol_type = other DNA

SEQ ID NO: 2206 - protein, 114 aa, Homo sapiens; identical to SEQ ID NO: 718

SEQ ID NO: 2207 - DNA, 345 bp, Homo sapiens; identical to SEQ ID NO: 168
  source 1..345: mol_type = other DNA

SEQ ID NO: 2208 - DNA, 342 bp, synthetic construct; identical to SEQ ID NO: 1619
  misc_feature 1..342: note = Description of Artificial Sequence: Synthetic construct
  source 1..342: mol_type = other DNA

SEQ ID NO: 2209 - DNA, 345 bp, synthetic construct; identical to SEQ ID NO: 1617
  misc_feature 1..345: note = Description of Artificial Sequence: Synthetic construct
  source 1..345: mol_type = other DNA

SEQ ID NO: 2210 - DNA, 345 bp, synthetic construct; identical to SEQ ID NO: 1618
  misc_feature 1..345: note = Description of Artificial Sequence: Synthetic construct
  source 1..345: mol_type = other DNA

SEQ ID NO: 2211 - protein, 237 aa, Homo sapiens; identical to SEQ ID NO: 724

SEQ ID NO: 2212 - DNA, 714 bp, Homo sapiens; identical to SEQ ID NO: 1622
  source 1..714: mol_type = other DNA

SEQ ID NO: 2213 - DNA, 711 bp, synthetic construct; identical to SEQ ID NO: 1623
  misc_feature 1..711: note = Description of Artificial Sequence: Synthetic construct
  source 1..711: mol_type = other DNA

SEQ ID NO: 2214 - protein, 26 aa, synthetic construct
  REGION 1..26: note = Description of Artificial Sequence: Synthetic linker
SGGGSGGGGSGGGGSGGGGSGGGSLQ

SEQ ID NO: 2215 - DNA, 78 bp, synthetic construct; identical to SEQ ID NO: 1647
  misc_feature 1..78: note = Description of Artificial Sequence: Synthetic linker
  source 1..78: mol_type = other DNA

SEQ ID NO: 2216 - protein, 395 aa, synthetic construct [sequence omitted]

SEQ ID NO: 2217 - protein, 583 aa, synthetic construct; identical to SEQ ID NO: 1957
  REGION 1..583: note = Description of Artificial Sequence: Synthetic polypeptide

SEQ ID NO: 2218 - protein, 583 aa, synthetic construct; identical to SEQ ID NO: 1959
  REGION 1..583: note = Description of Artificial Sequence: Synthetic polypeptide

SEQ ID NO: 2219 - protein, 22 aa, Homo sapiens
MCHQQLVISWFSLVFLASPLVA

SEQ ID NO: 2220 - DNA, 66 bp, Homo sapiens; identical to SEQ ID NO: 1580
  source 1..66: mol_type = other DNA

SEQ ID NO: 2221 - DNA, 66 bp, synthetic construct; identical to SEQ ID NO: 1581
  misc_feature 1..66: note = Description of Artificial Sequence: Synthetic signal sequence
  source 1..66: mol_type = other DNA

SEQ ID NO: 2222 - DNA, 66 bp, synthetic construct; identical to SEQ ID NO: 1582
  misc_feature 1..66: note = Description of Artificial Sequence: Synthetic signal sequence
  source 1..66: mol_type = other DNA

SEQ ID NO: 2223 - DNA, 66 bp, synthetic construct; identical to SEQ ID NO: 1583
  misc_feature 1..66: note = Description of Artificial Sequence: Synthetic signal sequence
  source 1..66: mol_type = other DNA

SEQ ID NO: 2224 - DNA, 66 bp, synthetic construct; identical to SEQ ID NO: 1584
  misc_feature 1..66: note = Description of Artificial Sequence: Synthetic signal sequence
  source 1..66: mol_type = other DNA

SEQ ID NO: 2225 - DNA, 66 bp, synthetic construct; identical to SEQ ID NO: 1585
  misc_feature 1..66: note = Description of Artificial Sequence: Synthetic signal sequence
  source 1..66: mol_type = other DNA

SEQ ID NO: 2226 - DNA, 66 bp, synthetic construct; identical to SEQ ID NO: 1586
  misc_feature 1..66: note = Description of Artificial Sequence: Synthetic signal sequence
  source 1..66: mol_type = other DNA

SEQ ID NO: 2227 - DNA, 66 bp, synthetic construct; identical to SEQ ID NO: 1587
  misc_feature 1..66: note = Description of Artificial Sequence: Synthetic signal sequence
  source 1..66: mol_type = other DNA

SEQ ID NO: 2228 - DNA, 66 bp, synthetic construct; identical to SEQ ID NO: 1588
  misc_feature 1..66: note = Description of Artificial Sequence: Synthetic signal sequence
  source 1..66: mol_type = other DNA

SEQ ID NO: 2229 - protein, 15 aa, synthetic construct
  REGION 1..15: note = Description of Artificial Sequence: Synthetic linker
GGGGSGGGGSGGGGS

SEQ ID NO: 2230 - DNA, 45 bp, synthetic construct; identical to SEQ ID NO: 1636
  misc_feature 1..45: note = Description of Artificial Sequence: Synthetic linker
  source 1..45: mol_type = other DNA

SEQ ID NO: 2231 - DNA, 45 bp, synthetic construct; identical to SEQ ID NO: 1637
  misc_feature 1..45: note = Description of Artificial Sequence: Synthetic linker
  source 1..45: mol_type = other DNA

SEQ ID NO: 2232 - DNA, 45 bp, synthetic construct; identical to SEQ ID NO: 1638
  misc_feature 1..45: note = Description of Artificial Sequence: Synthetic linker
  source 1..45: mol_type = other DNA

SEQ ID NO: 2233 - DNA, 45 bp, synthetic construct; identical to SEQ ID NO: 1639
  misc_feature 1..45: note = Description of Artificial Sequence: Synthetic linker
  source 1..45: mol_type = other DNA

SEQ ID NO: 2234 - DNA, 45 bp, synthetic construct; identical to SEQ ID NO: 1640
  misc_feature 1..45: note = Description of Artificial Sequence: Synthetic linker
  source 1..45: mol_type = other DNA

SEQ ID NO: 2235 - DNA, 45 bp, synthetic construct; identical to SEQ ID NO: 1641
  misc_feature 1..45: note = Description of Artificial Sequence: Synthetic linker
  source 1..45: mol_type = other DNA

SEQ ID NO: 2236 - protein, 306 aa, synthetic construct; identical to SEQ ID NO: 734
  REGION 1..306: note = Description of Artificial Sequence: Synthetic cleavage site

SEQ ID NO: 2237 - DNA, 921 bp, Homo sapiens; identical to SEQ ID NO: 1593
  source 1..921: mol_type = other DNA

SEQ ID NO: 2238 - DNA, 918 bp, synthetic construct; identical to SEQ ID NO: 1594
  misc_feature 1..918: note = Description of Artificial Sequence: Synthetic construct
  source 1..918: mol_type = other DNA

SEQ ID NO: 2239 - DNA, 918 bp, synthetic construct; identical to SEQ ID NO: 1595
  misc_feature 1..918: note = Description of Artificial Sequence: Synthetic construct
  source 1..918: mol_type = other DNA

SEQ ID NO: 2240 - DNA, 918 bp, synthetic construct; identical to SEQ ID NO: 1596
  misc_feature 1..918: note = Description of Artificial Sequence: Synthetic construct
  source 1..918: mol_type = other DNA

SEQ ID NO: 2241 - DNA, 918 bp, synthetic construct; identical to SEQ ID NO: 1597
  misc_feature 1..918: note = Description of Artificial Sequence: Synthetic construct
  source 1..918: mol_type = other DNA

SEQ ID NO: 2242 - DNA, 918 bp, synthetic construct; identical to SEQ ID NO: 1590
  misc_feature 1..918: note = Description of Artificial Sequence: Synthetic construct
  source 1..918: mol_type = other DNA

SEQ ID NO: 2243 - DNA, 918 bp, synthetic construct; identical to SEQ ID NO: 1591
  misc_feature 1..918: note = Description of Artificial Sequence: Synthetic construct
  source 1..918: mol_type = other DNA

SEQ ID NO: 2244 - DNA, 918 bp, synthetic construct; identical to SEQ ID NO: 1600
  misc_feature 1..918: note = Description of Artificial Sequence: Synthetic construct
  source 1..918: mol_type = other DNA

SEQ ID NO: 2245 - DNA, 918 bp, synthetic construct; identical to SEQ ID NO: 1601
  misc_feature 1..918: note = Description of Artificial Sequence: Synthetic construct
  source 1..918: mol_type = other DNA

SEQ ID NO: 2246 - DNA, 918 bp, synthetic construct; identical to SEQ ID NO: 1602
  misc_feature 1..918: note = Description of Artificial Sequence: Synthetic construct
  source 1..918: mol_type = other DNA

SEQ ID NO: 2247 - protein, 197 aa, Homo sapiens; identical to SEQ ID NO: 735

SEQ ID NO: 2248 - DNA, 594 bp, synthetic construct; identical to SEQ ID NO: 1605
  misc_feature 1..594: note = Description of Artificial Sequence: Synthetic construct
  source 1..594: mol_type = other DNA

SEQ ID NO: 2249 - DNA, 593 bp, synthetic construct
  misc_feature 1..593: note = Description of Artificial Sequence: Synthetic construct
  source 1..593: mol_type = other DNA
cgcaatctgccagtggccacccctgacccaggcatgttcccctgcctgcaccacagccagaacctgctgagggccgtgtccaatatgctgcagaaggcccgccagacactggagttttacccttgtaccagcgaggagatcgaccacgaggatatcacaaaggataagacctccacagtggaggcctgcctgccactggagctgaccaagaacgagtcctgtctgaacagccgggaaaccagcttcatcaccaacggctcctgcctggcctctcgcaagaccagcttcatgatggccctgtgcctgtcctctatctacgaggacctgaagatgtatcaggtggagttcaagaccatgaacgccaagctgctgatggaccctaagcggcagatctttctggatcagaatatgctggccgtgatcgacgagctgatgcaggccctgaacttcaatagcgagacagtgccacagaagagctccctggaggagcccgatttctacaagaccaagatcaagctgtgcatcctgctgcacgcctttcggatcagagccgtgaccatcgacagagtgatgtcctatctgaatgcctcttg

SEQ ID NO: 2250 - DNA, 594 bp, synthetic construct; identical to SEQ ID NO: 1607
  misc_feature 1..594: note = Description of Artificial Sequence: Synthetic construct
  source 1..594: mol_type = other DNA

SEQ ID NO: 2251 - DNA, 591 bp, synthetic construct; identical to SEQ ID NO: 1608
  misc_feature 1..591: note = Description of Artificial Sequence: Synthetic construct
  source 1..591: mol_type = other DNA

SEQ ID NO: 2252 - DNA, 591 bp, synthetic construct; identical to SEQ ID NO: 1609
  misc_feature 1..591: note = Description of Artificial Sequence: Synthetic construct
  source 1..591: mol_type = other DNA

SEQ ID NO: 2253 - DNA, 594 bp, synthetic construct; identical to SEQ ID NO: 1610
  misc_feature 1..594: note = Description of Artificial Sequence: Synthetic construct
  source 1..594: mol_type = other DNA

SEQ ID NO: 2254 - DNA, 597 bp, synthetic construct; identical to SEQ ID NO: 1611
  misc_feature 1..597: note = Description of Artificial Sequence: Synthetic construct
  source 1..597: mol_type = other DNA

SEQ ID NO: 2255 - DNA, 591 bp, synthetic construct; identical to SEQ ID NO: 1613
  misc_feature 1..591: note = Description of Artificial Sequence: Synthetic construct
  source 1..591: mol_type = other DNA

SEQ ID NO: 2256 - protein, 193 aa, Homo sapiens
VATPDPGMFPCLHHSQNLLRAVSNMLQKARQTLEFYPCTSEEIDHEDITKDKTSTVEACLPLELTKNESCLNSRETSFITNGSCLASRKTSFMMALCLSSIYEDLKMYQVEFKTMNAKLLMDPKRQIFLDQNMLAVIDELMQALNFNSETVPQKSSLEEPDFYKTKIKLCILLHAFRIRAVTIDRVMSYLNAS

SEQ ID NO: 2257 - DNA, 582 bp, Homo sapiens
  source 1..582: mol_type = other DNA
gtggccactccagacccaggaatgttcccatgccttcaccactcccaaaacctgctgagggccgtcagcaacatgctccagaaggccagacaaactctagaattttacccttgcacttctgaagagattgatcatgaagatatcacaaaagataaaaccagcacagtggaggcctgtttaccattggaattaaccaagaatgagagttgcctaaattccagagagacctctttcataactaatgggagttgcctggcctccagaaagacctcttttatgatggccctgtgccttagtagtatttatgaagacttgaagatgtaccaggtggagttcaagaccatgaatgcaaagcttctgatggatcctaagaggcagatctttctagatcaaaacatgctggcagttattgatgagctgatgcaggccctgaatttcaacagtgagactgtgccacaaaaatcctcccttgaagaaccggatttttataaaactaaaatcaagctctgcatacttcttcatgctttcagaattcgggcagtgactattgatagagtgatgagctatctgaatgcttcctaa

SEQ ID NO: 2258 - protein, 540 aa, synthetic construct; identical to SEQ ID NO: 1831
  REGION 1..540: note = Description of Artificial Sequence: Synthetic polypeptide

SEQ ID NO: 2259 - protein, 738 aa, synthetic construct; identical to SEQ ID NO: 1835
  REGION 1..738: note = Description of Artificial Sequence: Synthetic polypeptide

SEQ ID NO: 2260 - protein, 416 aa, Homo sapiens
MDEADRRLLRRCRLRLVEELQVDQLWDALLSRELFRPHMIEDIQRAGSGSRRDQARQLIIDLETRGSQALPLFISCLEDTGQDMLASFLRTNRQAAKLSKPTLENLTPVVLRPEIRKPEVLRPETPRPVDIGSGGFGDVGALESLRGNADLAYILSMEPCGHCLIINNVNFCRESGLRTRTGSNIDCEKLRRRFSSLHFMVEVKGDLTAKKMVLALLELAQQDHGALDCCVVVILSHGCQASHLQFPGAVYGTDGCPVSVEKIVNIFNGTSCPSLGGKPKLFFIQACGGEQKDHGFEVASTSPEDESPGSNPEPDATPFQEGLRTFDQLDAISSLPTPSDIFVSYSTFPGFVSWRDPKSGSWYVETLDDIFEQWAHSEDLQSLLLRVANAVSVKGIYKQMPGCFNFLRKKLFFKTS

SEQ ID NO: 2261 - DNA, 1251 bp, Homo sapiens
  source 1..1251: mol_type = other DNA
atggacgaagcggatcggcggctcctgcggcggtgccggctgcggctggtggaagagctgcaggtggaccagctctgggacgccctgctgagccgcgagctgttcaggccccatatgatcgaggacatccagcgggcaggctctggatctcggcgggatcaggccaggcagctgatcatagatctggagactcgagggagtcaggctcttcctttgttcatctcctgcttagaggacacaggccaggacatgctggcttcgtttctgcgaactaacaggcaagcagcaaagttgtcgaagccaaccctagaaaaccttaccccagtggtgctcagaccagagattcgcaaaccagaggttctcagaccggaaacacccagaccagtggacattggttctggaggatttggtgatgtcggtgctcttgagagtttgaggggaaatgcagatttggcttacatcctgagcatggagccctgtggccactgcctcattatcaacaatgtgaacttctgccgtgagtccgggctccgcacccgcactggctccaacatcgactgtgagaagttgcggcgtcgcttctcctcgctgcatttcatggtggaggtgaagggcgacctgactgccaagaaaatggtgctggctttgctggagctggcgcagcaggaccacggtgctctggactgctgcgtggtggtcattctctctcacggctgtcaggccagccacctgcagttcccaggggctgtctacggcacagatggatgccctgtgtcggtcgagaagattgtgaacatcttcaatgggaccagctgccccagcctgggagggaagcccaagctctttttcatccaggcctgtggtggggagcagaaagaccatgggtttgaggtggcctccacttcccctgaagacgagtcccctggcagtaaccccgagccagatgccaccccgttccaggaaggtttgaggaccttcgaccagctggacgccatatctagtttgcccacacccagtgacatctttgtgtcctactctactttcccaggttttgtttcctggagggaccccaagagtggctcctggtacgttgagaccctggacgacatctttgagcagtgggctcactctgaagacctgcagtccctcctgcttagggtcgctaatgctgtttcggtgaaagggatttataaacagatgcctggttgctttaatttcctccggaaaaaacttttctttaaaacatcataa

SEQ ID NO: 2262 - protein, 415 aa, Homo sapiens; identical to SEQ ID NO: 744

SEQ ID NO: 2263 - DNA, 1248 bp, synthetic construct
  misc_feature 1..1248: note = Description of Artificial Sequence: Synthetic construct
  source 1..1248: mol_type = other DNA
gacgaggccgacagaaggcttttgagaaggtgcaggctccggctggttgaggagctgcaagtcgaccaactgtgggacgccctgctgtccagggaactgtttaggccccacatgatcgaggacatccaaagagccgggtcaggatctaggagggatcaggctaggcaacttattatcgatctggaaaccagggggagccaagcccttcccctcttcatcagctgtctcgaggatacgggccaagacatgctcgccagttttctgagaacgaaccgacaggccgcaaagctgagtaaacccaccctggagaaccttacccctgtggtactcaggcccgaaatccggaagcccgaggtgctgaggccggagactccgaggcccgtggacatcggcagtggggggttcggtgacgtgggagcgctggaaagcctgcgcggcaacgctgacctcgcctacatccttagcatggagccgtgcggacactgtctgatcatcaacaacgtgaacttctgcagggagagcgggctgcggaccaggaccgggagcaatatcgattgcgaaaaactgaggaggaggttcagctcactgcacttcatggtggaggtgaagggcgacctgaccgccaagaagatggttctggccttgcttgagcttgcgcagcaagatcacggtgcccttgactgttgtgtggtggtgatactgagccacggctgtcaggccagccacctgcagtttccgggtgctgtctacgggaccgacgggtgccccgtgtctgtcgaaaagatagtgaacatcttcaacggcacgtcctgcccctcactgggcggcaagcccaagctcttctttatacaggcttgcggtggagagcagaaggaccatggcttcgaggtggccagcaccagccccgaggacgagagccctggtagcaatcccgagcccgatgccaccccatttcaagaaggattgaggaccttcgatcagctcgacgcgattagctctctgcccacccccagcgacatttttgtgagctacagcacgttcccgggtttcgtcagttggagggaccctaagagcggaagctggtatgtggagacgctggacgacatattcgagcaatgggcacacagcgaggatctgcagtcactcctgttgcgcgtggccaacgccgtttccgttaagggcatctataagcagatgccaggttgtttcaatttcctccgaaaaaagttgttctttaagaccagctga

SEQ ID NO: 2264 - protein, 5 aa, synthetic construct
  REGION 1..5: note = Description of Artificial Sequence: Synthetic linker
SGGGS

SEQ ID NO: 2265 - DNA, 15 bp, synthetic construct
  misc_feature 1..15: note = Description of Artificial Sequence: Synthetic linker
  source 1..15: mol_type = other DNA
tcaggtggcggtagt

SEQ ID NO: 2266 - protein, 607 aa, synthetic construct; identical to SEQ ID NO: 1151
  REGION 1..607: note = Description of Artificial Sequence: Synthetic polypeptide

SEQ ID NO: 2267 - protein, 607 aa, synthetic construct; identical to SEQ ID NO: 1152
  REGION 1..607: note = Description of Artificial Sequence: Synthetic polypeptide

SEQ ID NO: 2268 - protein, 607 aa, synthetic construct; identical to SEQ ID NO: 1153
  REGION 1..607: note = Description of Artificial Sequence: Synthetic polypeptide

SEQ ID NO: 2269 - DNA, 1245 bp, Homo sapiens
  source 1..1245: mol_type = other DNA
gacgaagcggatcggcggctcctgcggcggtgccggctgcggctggtggaagagctgcaggtggaccagctctgggacgccctgctgagccgcgagctgttcaggccccatatgatcgaggacatccagcgggcaggctctggatctcggcgggatcaggccaggcagctgatcatagatctggagactcgagggagtcaggctcttcctttgttcatctcctgcttagaggacacaggccaggacatgctggcttcgtttctgcgaactaacaggcaagcagcaaagttgtcgaagccaaccctagaaaaccttaccccagtggtgctcagaccagagattcgcaaaccagaggttctcagaccggaaacacccagaccagtggacattggttctggaggatttggtgatgtcggtgctcttgagagtttgaggggaaatgcagatttggcttacatcctgagcatggagccctgtggccactgcctcattatcaacaatgtgaacttctgccgtgagtccgggctccgcacccgcactggctccaacatcgactgtgagaagttgcggcgtcgcttctcctcgctgcatttcatggtggaggtgaagggcgacctgactgccaagaaaatggtgctggctttgctggagctggcgcagcaggaccacggtgctctggactgctgcgtggtggtcattctctctcacggctgtcaggccagccacctgcagttcccaggggctgtctacggcacagatggatgccctgtgtcggtcgagaagattgtgaacatcttcaatgggaccagctgccccagcctgggagggaagcccaagctctttttcatccaggcctgtggtggggagcagaaagaccatgggtttgaggtggcctccacttcccctgaagacgagtcccctggcagtaaccccgagccagatgccaccccgttccaggaaggtttgaggaccttcgaccagctggacgccatatctagtttgcccacacccagtgacatctttgtgtcctactctactttcccaggttttgtttcctggagggaccccaagagtggctcctggtacgttgagaccctggacgacatctttgagcagtgggctcactctgaagacctgcagtccctcctgcttagggtcgctaatgctgtttcggtgaaagggatttataaacagatgcctggttgctttaatttcctccggaaaaaacttttctttaaaacatca

SEQ ID NO: 2270 - DNA, 1245 bp, synthetic construct
  misc_feature 1..1245: note = Description of Artificial Sequence: Synthetic Construct
  source 1..1245: mol_type = other DNA
gacgaggccgacagaaggcttttgagaaggtgcaggctccggctggttgaggagctgcaagtcgaccaactgtgggacgccctgctgtccagggaactgtttaggccccacatgatcgaggacatccaaagagccgggtcaggatctaggagggatcaggctaggcaacttattatcgatctggaaaccagggggagccaagcccttcccctcttcatcagctgtctcgaggatacgggccaagacatgctcgccagttttctgagaacgaaccgacaggccgcaaagctgagtaaacccaccctggagaaccttacccctgtggtactcaggcccgaaatccggaagcccgaggtgctgaggccggagactccgaggcccgtggacatcggcagtggggggttcggtgacgtgggagcgctggaaagcctgcgcggcaacgctgacctcgcctacatccttagcatggagccgtgcggacactgtctgatcatcaacaacgtgaacttctgcagggagagcgggctgcggaccaggaccgggagcaatatcgattgcgaaaaactgaggaggaggttcagctcactgcacttcatggtggaggtgaagggcgacctgaccgccaagaagatggttctggccttgcttgagcttgcgcagcaagatcacggtgcccttgactgttgtgtggtggtgatactgagccacggctgtcaggccagccacctgcagtttccgggtgctgtctacgggaccgacgggtgccccgtgtctgtcgaaaagatagtgaacatcttcaacggcacgtcctgcccctcactgggcggcaagcccaagctcttctttatacaggcttgcggtggagagcagaaggaccatggcttcgaggtggccagcaccagccccgaggacgagagccctggtagcaatcccgagcccgatgccaccccatttcaagaaggattgaggaccttcgatcagctcgacgcgattagctctctgcccacccccagcgacatttttgtgagctacagcacgttcccgggtttcgtcagttggagggaccctaagagcggaagctggtatgtggagacgctggacgacatattcgagcaatgggcacacagcgaggatctgcagtcactcctgttgcgcgtggccaacgccgtttccgttaagggcatctataagcagatgccaggttgtttcaatttcctccgaaaaaagttgttctttaagaccagc

SEQ ID NO: 2271 - protein, 285 aa, Homo sapiens
GVDGFGDVGALESLRGNADLAYILSMEPCGHCLIINNVNFCRESGLRTRTGSNIDCEKLRRRFSSLHFMVEVKGDLTAKKMVLALLELARQDHGALDCCVVVILSHGCQASHLQFPGAVYGTDGCPVSVEKIVNIFNGTSCPSLGGKPKLFFIQACGGEQKDHGFEVASTSPEDESPGSNPEPDATPFQEGLRTFDQLDAISSLPTPSDIFVSYSTFPGFVSWRDPKSGSWYVETLDDIFEQWAHSEDLQSLLLRVANAVSVKGIYKQMPGCFNFLRKKLFFKTS

SEQ ID NO: 2272 - DNA, 855 bp, Homo sapiens
  source 1..855: mol_type = other DNA
ggcgtggacgggttcggtgacgtgggagcgctggaaagcctgcgcggcaacgctgacctcgcctacatccttagcatggagccgtgcggacactgtctgatcatcaacaacgtgaacttctgcagggagagcgggctgcggaccaggaccgggagcaatatcgattgcgaaaaactgaggaggaggttcagctcactgcacttcatggtggaggtgaagggcgacctgaccgccaagaagatggttctggccttgcttgagcttgcgcggcaagatcacggtgcccttgactgttgtgtggtggtgatactgagccacggctgtcaggccagccacctgcagtttccgggtgctgtctacgggaccgacgggtgccccgtgtctgtcgaaaagatagtgaacatcttcaacggcacgtcctgcccctcactgggcggcaagcccaagctcttctttatacaggcttgcggtggagagcagaaggaccatggcttcgaggtggccagcaccagccccgaggacgagagccctggtagcaatcccgagcccgatgccaccccatttcaagaaggattgaggaccttcgatcagctcgacgcgattagctctctgcccacccccagcgacatttttgtgagctacagcacgttcccgggtttcgtcagttggagggaccctaagagcggaagctggtatgtggagacgctggacgacatattcgagcaatgggcacacagcgaggatctgcagtcactcctgttgcgcgtggccaacgccgtttccgttaagggcatctataagcagatgccaggttgtttcaatttcctccgaaaaaagttgttctttaagaccagc

SEQ ID NO: 2273 - protein, 13 aa, synthetic construct
  REGION 1..13: note = Description of Artificial Sequence: Synthetic linker
VDYPYDVPDYALD

SEQ ID NO: 2274 - DNA, 39 bp, synthetic construct
  misc_feature 1..39: note = Description of Artificial Sequence: Synthetic linker
  source 1..39: mol_type = other DNA
gtcgactatccctacgatgttccggactacgcactggac

SEQ ID NO: 2275 - protein, 5 aa, synthetic construct
  REGION 1..5: note = Description of Artificial Sequence: Synthetic linker
SGGGS

SEQ ID NO: 2276 - DNA, 15 bp, synthetic construct
  misc_feature 1..15: note = Description of Artificial Sequence: Synthetic linker
  source 1..15: mol_type = other DNA
tcaggtggcggtagt

SEQ ID NO: 2277 - DNA, 15 bp, synthetic construct
  misc_feature 1..15: note = Description of Artificial Sequence: Synthetic linker
  source 1..15: mol_type = other DNA
agcggcggtggcagc

SEQ ID NO: 2278 - DNA, 15 bp, synthetic construct
  misc_feature 1..15: note = Description of Artificial Sequence: Synthetic linker
  source 1..15: mol_type = other DNA
tcaggcggggggagt

SEQ ID NO: 2279 - protein, 13 aa, synthetic construct
  REGION 1..13: note = Description of Artificial Sequence: Synthetic linker
QLIGMLQGLMRDL

SEQ ID NO: 2280 - DNA, 39 bp, synthetic construct
  misc_feature 1..39: note = Description of Artificial Sequence: Synthetic linker
  source 1..39: mol_type = other DNA
cagctgatagggatgctacaaggcctgatgcgtgacctg

SEQ ID NO: 2281 - skipped

SEQ ID NO: 2282 - protein, 107 aa, synthetic construct
  REGION 1..107: note = Description of Artificial Sequence: Synthetic Destabilizing Domain (DD)
GVQVETISPGDGRTFPKRGQTCVVHYTGMLEDGKKVDSSRDRNKPFKFMLGKQEVIRGWEEGVAQMSVGQRAKLTISPDYAYGATGHPGIIPPHATLVFDVELLKLE

SEQ ID NO: 2283 - DNA, 321 bp, synthetic construct
  misc_feature 1..321: note = Description of Artificial Sequence: Synthetic Destabilizing Domain (DD)
  source 1..321: mol_type = other DNA
ggcgtgcaggttgagactataagcccaggcgacggcaggaccttccccaagaggggccagacatgcgtggtgcactacaccggcatgcttgaagacggcaaaaaggtggactcaagcagggacaggaacaagcccttcaagttcatgttgggcaaacaggaggtgatcagaggctgggaggagggtgttgcccagatgagcgtggggcagagggccaagctcacgataagtcccgattacgcctacggcgccaccggtcaccccggcatcatccccccacacgccaccctggtgttcgacgtggaattgctgaagctggag

SEQ ID NO: 2284 - protein, 159 aa, synthetic construct; identical to SEQ ID NO: 1173
  REGION 1..159: note = Description of Artificial Sequence: Synthetic Destabilizing Domain (DD)

SEQ ID NO: 2285 - DNA, 321 bp, synthetic construct; identical to SEQ ID NO: 2283
  misc_feature 1..321: note = Description of Artificial Sequence: Synthetic Destabilizing Domain (DD)
  source 1..321: mol_type = other DNA

SEQ ID NO: 2286 - protein, 158 aa, synthetic construct
  REGION 1..158: note = Description of Artificial Sequence: Synthetic Destabilizing Domain (DD)
ISLIAALAVDYVIGMENAMPWNLPADLAWFKRNTLNKPVIMGRHTWESIGRPLPGRKNIILSSQPGTDDRVTWVKSVDEAIAACGDVPEIMVIGGGRVYEQFLPKAQKLYLTHIDAEVEGDTHFPDYKPDDWESVFSEFHDADAQNSHSYCFEILERR

SEQ ID NO: 2287 - DNA, 236 bp, synthetic construct
  misc_feature 1..236: note = Description of Artificial Sequence: Synthetic Destabilizing Domain (DD)
  source 1..236: mol_type = other DNA
atctctctgattgcggcgctggcagttgactacgttattggcatggaaaacgcgatgccatggaacctcccggctgacctggcgtggttcaaacgtaacaccctgaacaaacctgtgatcatgggtcgtcacacctgggaatctattggccgtcctctcccgggtcgtaaaaacatcattctgtcttctcagccaggcaccgacgaccgtgttacctgggttaaaagcgttgacga

SEQ ID NO: 2288 - protein, 187 aa, synthetic construct; identical to SEQ ID NO: 11
  REGION 1..187: note = Description of Artificial Sequence: Synthetic Destabilizing Domain (DD)

SEQ ID NO: 2289 - DNA, 561 bp, synthetic construct; identical to SEQ ID NO: 73
  misc_feature 1..561: note = Description of Artificial Sequence: Synthetic Destabilizing Domain (DD)
  source 1..561: mol_type = other DNA

SEQ ID NO: 2290 - protein, 187 aa, synthetic construct; identical to SEQ ID NO: 27
  REGION 1..187: note = Description of Artificial Sequence: Synthetic Destabilizing Domain (DD)

SEQ ID NO: 2291 - DNA, 561 bp, synthetic construct; identical to SEQ ID NO: 75
  misc_feature 1..561: note = Description of Artificial Sequence: Synthetic Destabilizing Domain (DD)
  source 1..561: mol_type = other DNA

SEQ ID NO: 2292 - protein, 187 aa, synthetic construct; identical to SEQ ID NO: 20
  REGION 1..187: note = Description of Artificial Sequence: Synthetic Destabilizing Domain (DD)

SEQ ID NO: 2293 - DNA, 561 bp, synthetic construct; identical to SEQ ID NO: 79
  misc_feature 1..561: note = Description of Artificial Sequence: Synthetic Destabilizing Domain (DD)
  source 1..561: mol_type = other DNA

SEQ ID NO: 2294 - DNA, 1587 bp, synthetic construct
  misc_feature 1..1587: note = Description of Artificial Sequence: Synthetic Payload sequence
  source 1..1587: mol_type = other DNA
atgggcgtgcaggttgagactataagcccaggcgacggcaggaccttccccaagaggggccagacatgcgtggtgcactacaccggcatgcttgaagacggcaaaaaggtggactcaagcagggacaggaacaagcccttcaagttcatgttgggcaaacaggaggtgatcagaggctgggaggagggtgttgcccagatgagcgtggggcagagggccaagctcacgataagtcccgattacgcctacggcgccaccggtcaccccggcatcatccccccacacgccaccctggtgttcgacgtggaattgctgaagcccgagagcggcggtggcagcgacgaggccgacagaaggcttttgagaaggtgcaggctccggctggttgaggagctgcaagtcgaccaactgtgggacgccctgctgtccagggaactgtttaggccccacatgatcgaggacatccaaagagccgggtcaggatctaggagggatcaggctaggcaacttattatcgatctggaaaccagggggagccaagcccttcccctcttcatcagctgtctcgaggatacgggccaagacatgctcgccagttttctgagaacgaaccgacaggccgcaaagctgagtaaacccaccctggagaaccttacccctgtggtactcaggcccgaaatccggaagcccgaggtgctgaggccggagactccgaggcccgtggacatcggcagtggggggttcggtgacgtgggagcgctggaaagcctgcgcggcaacgctgacctcgcctacatccttagcatggagccgtgcggacactgtctgatcatcaacaacgtgaacttctgcagggagagcgggctgcggaccaggaccgggagcaatatcgattgcgaaaaactgaggaggaggttcagctcactgcacttcatggtggaggtgaagggcgacctgaccgccaagaagatggttctggccttgcttgagcttgcgcagcaagatcacggtgcccttgactgttgtgtggtggtgatactgagccacggctgtcaggccagccacctgcagtttccgggtgctgtctacgggaccgacgggtgccccgtgtctgtcgaaaagatagtgaacatcttcaacggcacgtcctgcccctcactgggcggcaagcccaagctcttctttatacaggcttgcggtggagagcagaaggaccatggcttcgaggtggccagcaccagccccgaggacgagagccctggtagcaatcccgagcccgatgccaccccatttcaagaaggattgaggaccttcgatcagctcgacgcgattagctctctgcccacccccagcgacatttttgtgagctacagcacgttcccgggtttcgtcagttggagggaccctaagagcggaagctggtatgtggagacgctggacgacatattcgagcaatgggcacacagcgaggatctgcagtcactcctgttgcgcgtggccaacgccgtttccgttaagggcatctataagcagatgccaggttgtttcaatttcctccgaaaaaagttgttctttaagaccagctga

SEQ ID NO: 2295 - DNA, 1740 bp, synthetic construct
  misc_feature 1..1740: note = Description of Artificial Sequence: Synthetic Payload sequence
  source 1..1740: mol_type = other DNA
atgatctctctgattgcggcgctggcagttgactacgttattggcatggaaaacgcgatgccatggaacctcccggctgacctggcgtggttcaaacgtaacaccctgaacaaacctgtgatcatgggtcgtcacacctgggaatctattggccgtcctctcccgggtcgtaaaaacatcattctgtcttctcagccaggcaccgacgaccgtgttacctgggttaaaagcgttgacgaagcgattgctgcgtgcggtgatgttcctgaaattatggtgatcggcggtggccgtgttatcgaacagttcctgccgaaagcgcagaaactgtacctgacccacatcgacgcggaagttgaaggtgacacccacttcccggactacgaaccggatgattgggagagcgtattctccgaattccatgatgcggatgcgcaaaactctcattcttactgttttgaaatcctggaacgtcgtagcggcggtggcagcgacgaggccgacagaaggcttttgagaaggtgcaggctccggctggttgaggagctgcaagtcgaccaactgtgggacgccctgctgtccagggaactgtttaggccccacatgatcgaggacatccaaagagccgggtcaggatctaggagggatcaggctaggcaacttattatcgatctggaaaccagggggagccaagcccttcccctcttcatcagctgtctcgaggatacgggccaagacatgctcgccagttttctgagaacgaaccgacaggccgcaaagctgagtaaacccaccctggagaaccttacccctgtggtactcaggcccgaaatccggaagcccgaggtgctgaggccggagactccgaggcccgtggacatcggcagtggggggttcggtgacgtgggagcgctggaaagcctgcgcggcaacgctgacctcgcctacatccttagcatggagccgtgcggacactgtctgatcatcaacaacgtgaacttctgcagggagagcgggctgcggaccaggaccgggagcaatatcgattgcgaaaaactgaggaggaggttcagctcactgcacttcatggtggaggtgaagggcgacctgaccgccaagaagatggttctggccttgcttgagcttgcgcagcaagatcacggtgcccttgactgttgtgtggtggtgatactgagccacggctgtcaggccagccacctgcagtttccgggtgctgtctacgggaccgacgggtgccccgtgtctgtcgaaaagatagtgaacatcttcaacggcacgtcctgcccctcactgggcggcaagcccaagctcttctttatacaggcttgcggtggagagcagaaggaccatggcttcgaggtggccagcaccagccccgaggacgagagccctggtagcaatcccgagcccgatgccaccccatttcaagaaggattgaggaccttcgatcagctcgacgcgattagctctctgcccacccccagcgacatttttgtgagctacagcacgttcccgggtttcgtcagttggagggaccctaagagcggaagctggtatgtggagacgctggacgacatattcgagcaatgggcacacagcgaggatctgcagtcactcctgttgcgcgtggccaacgccgtttccgttaagggcatctataagcagatgccaggttgtttcaatttcctccgaaaaaagttgttctttaagaccagctga

SEQ ID NO: 2296 - DNA, 1824 bp, synthetic construct; identical to SEQ ID NO: 178
  misc_feature 1..1824: note = Description of Artificial Sequence: Synthetic Payload sequence
  source 1..1824: mol_type = other DNA

SEQ ID NO: 2297 - DNA, 1824 bp, synthetic construct; identical to SEQ ID NO: 179
  misc_feature 1..1824: note = Description of Artificial Sequence: Synthetic Payload sequence
  source 1..1824: mol_type = other DNA

SEQ ID NO: 2298 - DNA, 1824 bp, synthetic construct; identical to SEQ ID NO: 180
  misc_feature 1..1824: note = Description of Artificial Sequence: Synthetic Payload sequence
  source 1..1824: mol_type = other DNA

SEQ ID NO: 2299 - DNA, 1242 bp, synthetic construct
  misc_feature 1..1242: note = Description of Artificial Sequence: Synthetic Payload sequence
  source 1..1242: mol_type = other DNA
atgctggagggcgtgcaggttgagactataagcccaggcgacggcaggaccttccccaagaggggccagacatgcgtggtgcactacaccggcatgcttgaagacggcaaaaaggtggactcaagcagggacaggaacaagcccttcaagttcatgttgggcaaacaggaggtgatcagaggctgggaggagggtgttgcccagatgagcgtggggcagagggccaagctcacgataagtcccgattacgcctacggcgccaccggtcaccccggcatcatccccccacacgccaccctggtgttcgacgtggaattgctgaagctggagagcggcggtggcagcggcgtggacgggttcggtgacgtgggagcgctggaaagcctgcgcggcaacgctgacctcgcctacatccttagcatggagccgtgcggacactgtctgatcatcaacaacgtgaacttctgcagggagagcgggctgcggaccaggaccgggagcaatatcgattgcgaaaaactgaggaggaggttcagctcactgcacttcatggtggaggtgaagggcgacctgaccgccaagaagatggttctggccttgcttgagcttgcgcggcaagatcacggtgcccttgactgttgtgtggtggtgatactgagccacggctgtcaggccagccacctgcagtttccgggtgctgtctacgggaccgacgggtgccccgtgtctgtcgaaaagatagtgaacatcttcaacggcacgtcctgcccctcactgggcggcaagcccaagctcttctttatacaggcttgcggtggagagcagaaggaccatggcttcgaggtggccagcaccagccccgaggacgagagccctggtagcaatcccgagcccgatgccaccccatttcaagaaggattgaggaccttcgatcagctcgacgcgattagctctctgcccacccccagcgacatttttgtgagctacagcacgttcccgggtttcgtcagttggagggaccctaagagcggaagctggtatgtggagacgctggacgacatattcgagcaatgggcacacagcgaggatctgcagtcactcctgttgcgcgtggccaacgccgtttccgttaagggcatctataagcagatgccaggttgtttcaatttcctccgaaaaaagttgttctttaagaccagccagctgatagggatgctacaaggcctgatgcgtgacctgtga

SEQ ID NO: 2300 - DNA, 1578 bp, synthetic construct
  misc_feature 1..1578: note = Description of Artificial Sequence: Synthetic Payload sequence
  source 1..1578: mol_type = other DNA
atggacgaggccgacagaaggcttttgagaaggtgcaggctccggctggttgaggagctgcaagtcgaccaactgtgggacgccctgctgtccagggaactgtttaggccccacatgatcgaggacatccaaagagccgggtcaggatctaggagggatcaggctaggcaacttattatcgatctggaaaccagggggagccaagcccttcccctcttcatcagctgtctcgaggatacgggccaagacatgctcgccagttttctgagaacgaaccgacaggccgcaaagctgagtaaacccaccctggagaaccttacccctgtggtactcaggcccgaaatccggaagcccgaggtgctgaggccggagactccgaggcccgtggacatcggcagtggggggttcggtgacgtgggagcgctggaaagcctgcgcggcaacgctgacctcgcctacatccttagcatggagccgtgcggacactgtctgatcatcaacaacgtgaacttctgcagggagagcgggctgcggaccaggaccgggagcaatatcgattgcgaaaaactgaggaggaggttcagctcactgcacttcatggtggaggtgaagggcgacctgaccgccaagaagatggttctggccttgcttgagcttgcgcagcaagatcacggtgcccttgactgttgtgtggtggtgatactgagccacggctgtcaggccagccacctgcagtttccgggtgctgtctacgggaccgacgggtgccccgtgtctgtcgaaaagatagtgaacatcttcaacggcacgtcctgcccctcactgggcggcaagcccaagctcttctttatacaggcttgcggtggagagcagaaggaccatggcttcgaggtggccagcaccagccccgaggacgagagccctggtagcaatcccgagcccgatgccaccccatttcaagaaggattgaggaccttcgatcagctcgacgcgattagctctctgcccacccccagcgacatttttgtgagctacagcacgttcccgggtttcgtcagttggagggaccctaagagcggaagctggtatgtggagacgctggacgacatattcgagcaatgggcacacagcgaggatctgcagtcactcctgttgcgcgtggccaacgccgtttccgttaagggcatctataagcagatgccaggttgtttcaatttcctccgaaaaaagttgttctttaagaccagcagcggcggcgtgcaggttgagactataagcccaggcgacggcaggaccttccccaagaggggccagacatgcgtggtgcactacaccggcatgcttggcgacggcaaaaaggtggactcaagcagggacaggaacaagcccttcaagttcatgttgggcaaacaggaggtgatcagaggctgggaggagggtgttgcccagatgagcgtggggcagggcgccaagctcacgataagtcccgattacgcctacggcgccaccggtcaccccggcatcatccccccacacgccaccctggtgttcgacgtggaattgctggagctggagtga

SEQ ID NO: 2301 - DNA, 1731 bp, synthetic construct
  misc_feature 1..1731: note = Description of Artificial Sequence: Synthetic Payload sequence
  source 1..1731: mol_type = other DNA
atggacgaggccgacagaaggcttttgagaaggtgcaggctccggctggttgaggagctgcaagtcgaccaactgtgggacgccctgctgtccagggaactgtttaggccccacatgatcgaggacatccaaagagccgggtcaggatctaggagggatcaggctaggcaacttattatcgatctggaaaccagggggagccaagcccttcccctcttcatcagctgtctcgaggatacgggccaagacatgctcgccagttttctgagaacgaaccgacaggccgcaaagctgagtaaacccaccctggagaaccttacccctgtggtactcaggcccgaaatccggaagcccgaggtgctgaggccggagactccgaggcccgtggacatcggcagtggggggttcggtgacgtgggagcgctggaaagcctgcgcggcaacgctgacctcgcctacatccttagcatggagccgtgcggacactgtctgatcatcaacaacgtgaacttctgcagggagagcgggctgcggaccaggaccgggagcaatatcgattgcgaaaaactgaggaggaggttcagctcactgcacttcatggtggaggtgaagggcgacctgaccgccaagaagatggttctggccttgcttgagcttgcgcagcaagatcacggtgcccttgactgttgtgtggtggtgatactgagccacggctgtcaggccagccacctgcagtttccgggtgctgtctacgggaccgacgggtgccccgtgtctgtcgaaaagatagtgaacatcttcaacggcacgtcctgcccctcactgggcggcaagcccaagctcttctttatacaggcttgcggtggagagcagaaggaccatggcttcgaggtggccagcaccagccccgaggacgagagccctggtagcaatcccgagcccgatgccaccccatttcaagaaggattgaggaccttcgatcagctcgacgcgattagctctctgcccacccccagcgacatttttgtgagctacagcacgttcccgggtttcgtcagttggagggaccctaagagcggaagctggtatgtggagacgctggacgacatattcgagcaatgggcacacagcgaggatctgcagtcactcctgttgcgcgtggccaacgccgtttccgttaagggcatctataagcagatgccaggttgtttcaatttcctccgaaaaaagttgttctttaagaccagcagcggcatctctctgattgcggcgctggcagttgactacgttattggcatggaaaacgcgatgccatggaacctcccggctgacctggcgtggttcaaacgtaacaccctgaacaaacctgtgatcatgggtcgtcacacctgggaatctattggccgtcctctcccgggtcgtaaaaacatcattctgtcttctcagccaggcaccgacgaccgtgttacctgggttaaaagcgttgacgaagcgattgctgcgtgcggtgatgttcctgaaattatggtgatcggcggtggccgtgttatcgaacagttcctgccgaaagcgcagaaactgtacctgacccacatcgacgcggaagttgaaggtgacacccacttcccggactacgaaccggatgattgggagagcgtattctccgaattccatgatgcggatgcgcaaaactctcattcttactgttttgaaatcctggaacgtcgttga

SEQ ID NO: 2302 - DNA, 1731 bp, synthetic construct
  misc_feature 1..1731: note = Description of Artificial Sequence: Synthetic Payload sequence
  source 1..1731: mol_type = other DNA
atggacgaggccgacagaaggcttttgagaaggtgcaggctccggctggttgaggagctgcaagtcgaccaactgtgggacgccctgctgtccagggaactgtttaggccccacatgatcgaggacatccaaagagccgggtcaggatctaggagggatcaggctaggcaacttattatcgatctggaaaccagggggagccaagcccttcccctcttcatcagctgtctcgaggatacgggccaagacatgctcgccagttttctgagaacgaaccgacaggccgcaaagctgagtaaacccaccctggagaaccttacccctgtggtactcaggcccgaaatccggaagcccgaggtgctgaggccggagactccgaggcccgtggacatcggcagtggggggttcggtgacgtgggagcgctggaaagcctgcgcggcaacgctgacctcgcctacatccttagcatggagccgtgcggacactgtctgatcatcaacaacgtgaacttctgcagggagagcgggctgcggaccaggaccgggagcaatatcgattgcgaaaaactgaggaggaggttcagctcactgcacttcatggtggaggtgaagggcgacctgaccgccaagaagatggttctggccttgcttgagcttgcgcagcaagatcacggtgcccttgactgttgtgtggtggtgatactgagccacggctgtcaggccagccacctgcagtttccgggtgctgtctacgggaccgacgggtgccccgtgtctgtcgaaaagatagtgaacatcttcaacggcacgtcctgcccctcactgggcggcaagcccaagctcttctttatacaggcttgcggtggagagcagaaggaccatggcttcgaggtggccagcaccagccccgaggacgagagccctggtagcaatcccgagcccgatgccaccccatttcaagaaggattgaggaccttcgatcagctcgacgcgattagctctctgcccacccccagcgacatttttgtgagctacagcacgttcccgggtttcgtcagttggagggaccctaagagcggaagctggtatgtggagacgctggacgacatattcgagcaatgggcacacagcgaggatctgcagtcactcctgttgcgcgtggccaacgccgtttccgttaagggcatctataagcagatgccaggttgtttcaatttcctccgaaaaaagttgttctttaagaccagcagcggcatctctctgattgcggcgctggcagttgactacgttattggcatggaaaacgcgatgccatggaacctcccggctgacctggcgtggttcaaacgtaacaccctgaacaaacctgtgatcatgggtcgtcacacctgggaatctattggccgtcctctcccgggtcgtaaaaacatcattctgtcttctcagccaggcaccgacgaccgtgttacctgggttaaaagcgttgacgaagcgattgctgcgtgcggtgatgttcctgaaattatggtgatcggcggtggccgtgtttacgaacagttcctgccgaaagcgcagaaactgtacctgacccacatcgacgcggaagttgaaggtgacacccacttcccggactacaaaccggatgattgggagagcgtattctccgaattccatgatgcggatgcgcaaaactctcattcttactgttttgaaatcctggaacgtcgttga

SEQ ID NO: 2303 - DNA, 1293 bp, synthetic construct
  misc_feature 1..1293: note = Description of Artificial Sequence: Synthetic Payload sequence
  source 1..1293: mol_type = other DNA
atgccgaacccaaggccagggaagccctctgctcctagcctggccctcggccccagccctggcgctagcccctcttggagggcggctccgaaggcttccgacctcctgggtgctaggggccctggtggaaccttccaaggcagggatctgcgaggaggggcgcacgcctctagctcaagcctgaacccgatgcccccctcacagctgcaactgcctaccctgccgctcgtcatggtggcccccagcggcgcaagactgggcccgttgccgcacctgcaagccttgctgcaggaccggccacatttcatgcaccagctcagcaccgtggacgcacatgcaaggacacccgtgctgcaagtccaccccctggagagccctgccatgatcagcctgacgccgcccaccaccgcaaccggcgtgttttcactgaaggcaagacccgggctgccaccgggcatcaacgtggccagcctggaatgggtgagcagggagccagcgctcctgtgtaccttcccaaacccatccgccccaagaaaggacagcaccctgtctgccgtgccccaatcatcttacccgctgctggcgaatggcgtatgcaagtggcccggatgtgaaaaggtgttcgaggagccggaagatttcctgaaacattgccaggccgaccacctgttggacgaaaagggaagggcccaatgcctgcttcagagggagatggtgcagagcttggagcaacaactcgtgctcgagaaggagaagctgagcgccatgcaggcacacctcgccggcaagatggccctgaccaaagccagtagcgtagccagctccgacaagggtagctgttgcatcgtggccgcaggaagtcaaggccccgttgtgcccgcctggagcggtccaagggaggcacccgactcactgttcgccgtgaggaggcatctgtggggcagccacggtaacagcacgttccccgagttcctgcataacatggactacttcaagttccacaacatgcggcctccattcacctacgccacactgataaggtgggctatcctggaggctcccgagaagcaaaggaccctgaacgagatctaccactggttcaccaggatgttcgctttctttaggaaccaccccgcgacctggaaaaacgccataaggcataacttgagccttcacaagtgcttcgtgagggtggagagtgagaaaggtgccgtgtggactgtggatgagttggagttccgcaagaagcgaagccaacgacctagcaggtgtagcaatccaacccccggaccc

SEQ ID NO: 2304 - DNA, 1290 bp, synthetic construct
  misc_feature 1..1290: note = Description of Artificial Sequence: Synthetic Payload sequence
  source 1..1290: mol_type = other DNA
ccgaacccaaggccagggaagccctctgctcctagcctggccctcggccccagccctggcgctagcccctcttggagggcggctccgaaggcttccgacctcctgggtgctaggggccctggtggaaccttccaaggcagggatctgcgaggaggggcgcacgcctctagctcaagcctgaacccgatgcccccctcacagctgcaactgcctaccctgccgctcgtcatggtggcccccagcggcgcaagactgggcccgttgccgcacctgcaagccttgctgcaggaccggccacatttcatgcaccagctcagcaccgtggacgcacatgcaaggacacccgtgctgcaagtccaccccctggagagccctgccatgatcagcctgacgccgcccaccaccgcaaccggcgtgttttcactgaaggcaagacccgggctgccaccgggcatcaacgtggccagcctggaatgggtgagcagggagccagcgctcctgtgtaccttcccaaacccatccgccccaagaaaggacagcaccctgtctgccgtgccccaatcatcttacccgctgctggcgaatggcgtatgcaagtggcccggatgtgaaaaggtgttcgaggagccggaagatttcctgaaacattgccaggccgaccacctgttggacgaaaagggaagggcccaatgcctgcttcagagggagatggtgcagagcttggagcaacaactcgtgctcgagaaggagaagctgagcgccatgcaggcacacctcgccggcaagatggccctgaccaaagccagtagcgtagccagctccgacaagggtagctgttgcatcgtggccgcaggaagtcaaggccccgttgtgcccgcctggagcggtccaagggaggcacccgactcactgttcgccgtgaggaggcatctgtggggcagccacggtaacagcacgttccccgagttcctgcataacatggactacttcaagttccacaacatgcggcctccattcacctacgccacactgataaggtgggctatcctggaggctcccgagaagcaaaggaccctgaacgagatctaccactggttcaccaggatgttcgctttctttaggaaccaccccgcgacctggaaaaacgccataaggcataacttgagccttcacaagtgcttcgtgagggtggagagtgagaaaggtgccgtgtggactgtggatgagttggagttccgcaagaagcgaagccaacgacctagcaggtgtagcaatccaacccccggaccc

SEQ ID NO: 2305 - DNA, 1188 bp, synthetic construct
  misc_feature 1..1188: note = Description of Artificial Sequence: Synthetic Payload sequence
  source 1..1188: mol_type = other DNA
atgccgaacccaaggccagggaagccctctgctcctagcctggccctcggccccagccctggcgctagcccctcttggagggcggctccgaaggcttccgacctcctgggtgctaggggccctggtggaaccttccaaggcagggatctgcgaggaggggcgcacgcctctagctcaagcctgaacccgatgcccccctcacagctgcagctcagcaccgtggacgcacatgcaaggacacccgtgctgcaagtccaccccctggagagccctgccatgatcagcctgacgccgcccaccaccgcaaccggcgtgttttcactgaaggcaagacccgggctgccaccgggcatcaacgtggccagcctggaatgggtgagcagggagccagcgctcctgtgtaccttcccaaacccatccgccccaagaaaggacagcaccctgtctgccgtgccccaatcatcttacccgctgctggcgaatggcgtatgcaagtggcccggatgtgaaaaggtgttcgaggagccggaagatttcctgaaacattgccaggccgaccacctgttggacgaaaagggaagggcccaatgcctgcttcagagggagatggtgcagagcttggagcaacaactcgtgctcgagaaggagaagctgagcgccatgcaggcacacctcgccggcaagatggccctgaccaaagccagtagcgtagccagctccgacaagggtagctgttgcatcgtggccgcaggaagtcaaggccccgttgtgcccgcctggagcggtccaagggaggcacccgactcactgttcgccgtgaggaggcatctgtggggcagccacggtaacagcacgttccccgagttcctgcataacatggactacttcaagttccacaacatgcggcctccattcacctacgccacactgataaggtgggctatcctggaggctcccgagaagcaaaggaccctgaacgagatctaccactggttcaccaggatgttcgctttctttaggaaccaccccgcgacctggaaaaacgccataaggcataacttgagccttcacaagtgcttcgtgagggtggagagtgagaaaggtgccgtgtggactgtggatgagttggagttccgcaagaagcgaagccaacgacctagcaggtgtagcaatccaacccccggaccc

SEQ ID NO: 2306 - DNA, 1185 bp, synthetic construct
  misc_feature 1..1185: note = Description of Artificial Sequence: Synthetic Payload sequence
  source 1..1185: mol_type = other DNA
ccgaacccaaggccagggaagccctctgctcctagcctggccctcggccccagccctggcgctagcccctcttggagggcggctccgaaggcttccgacctcctgggtgctaggggccctggtggaaccttccaaggcagggatctgcgaggaggggcgcacgcctctagctcaagcctgaacccgatgcccccctcacagctgcagctcagcaccgtggacgcacatgcaaggacacccgtgctgcaagtccaccccctggagagccctgccatgatcagcctgacgccgcccaccaccgcaaccggcgtgttttcactgaaggcaagacccgggctgccaccgggcatcaacgtggccagcctggaatgggtgagcagggagccagcgctcctgtgtaccttcccaaacccatccgccccaagaaaggacagcaccctgtctgccgtgccccaatcatcttacccgctgctggcgaatggcgtatgcaagtggcccggatgtgaaaaggtgttcgaggagccggaagatttcctgaaacattgccaggccgaccacctgttggacgaaaagggaagggcccaatgcctgcttcagagggagatggtgcagagcttggagcaacaactcgtgctcgagaaggagaagctgagcgccatgcaggcacacctcgccggcaagatggccctgaccaaagccagtagcgtagccagctccgacaagggtagctgttgcatcgtggccgcaggaagtcaaggccccgttgtgcccgcctggagcggtccaagggaggcacccgactcactgttcgccgtgaggaggcatctgtggggcagccacggtaacagcacgttccccgagttcctgcataacatggactacttcaagttccacaacatgcggcctccattcacctacgccacactgataaggtgggctatcctggaggctcccgagaagcaaaggaccctgaacgagatctaccactggttcaccaggatgttcgctttctttaggaaccaccccgcgacctggaaaaacgccataaggcataacttgagccttcacaagtgcttcgtgagggtggagagtgagaaaggtgccgtgtggactgtggatgagttggagttccgcaagaagcgaagccaacgacctagcaggtgtagcaatccaacccccggaccc

SEQ ID NO: 2307 - DNA, 1296 bp, synthetic construct
  misc_feature 1..1296: note = Description of Artificial Sequence: Synthetic Payload sequence
  source 1..1296: mol_type = other DNA
atgccgaacccaaggccagggaagccctctgctcctagcctggccctcggccccagccctggcgctagcccctcttggagggcggctccgaaggcttccgacctcctgggtgctaggggccctggtggaaccttccaaggcagggatctgcgaggaggggcgcacgcctctagctcaagcctgaacccgatgcccccctcacagctgcaactgcctaccctgccgctcgtcatggtggcccccagcggcgcaagactgggcccgttgccgcacctgcaagccttgctgcaggaccggccacatttcatgcaccagctcagcaccgtggacgcacatgcaaggacacccgtgctgcaagtccaccccctggagagccctgccatgatcagcctgacgccgcccaccaccgcaaccggcgtgttttcactgaaggcaagacccgggctgccaccgggcatcaacgtggccagcctggaatgggtgagcagggagccagcgctcctgtgtaccttcccaaacccatccgccccaagaaaggacagcaccctgtctgccgtgccccaatcatcttacccgctgctggcgaatggcgtatgcaagtggcccggatgtgaaaaggtgttcgaggagccggaagatttcctgaaacattgccaggccgaccacctgttggacgaaaagggaagggcccaatgcctgcttcagagggagatggtgcagagcttggagcaacaactcgtgctcgagaaggagaagctgagcgccatgcaggcacacctcgccggcaagatggccctgaccaaagccagtagcgtagccagctccgacaagggtagctgttgcatcgtggccgcaggaagtcaaggccccgttgtgcccgcctggagcggtccaagggaggcacccgactcactgttcgccgtgaggaggcatctgtggggcagccacggtaacagcacgttccccgagttcctgcataacatggactacttcaagttccacaacatgcggcctccattcacctacgccacactgataaggtgggctatcctggaggctcccgagaagcaaaggaccctgaacgagatctaccactggttcaccaggatgttcgctttctttaggaaccaccccgcgacctggaaaaacgccataaggcataacttgagccttcacaagtgcttcgtgagggtggagagtgagaaaggtgccgtgtggactgtggatgagttggagttccgcaagaagcgaagccaacgacctagcaggtgtagcaatccaacccccggaccctga

SEQ ID NO: 2308 - DNA, 1191 bp, synthetic construct
  misc_feature 1..1191: note = Description of Artificial Sequence: Synthetic Construct
  source 1..1191: mol_type = other DNA
atgccgaacccaaggccagggaagccctctgctcctagcctggccctcggccccagccctggcgctagcccctcttggagggcggctccgaaggcttccgacctcctgggtgctaggggccctggtggaaccttccaaggcagggatctgcgaggaggggcgcacgcctctagctcaagcctgaacccgatgcccccctcacagctgcagctcagcaccgtggacgcacatgcaaggacacccgtgctgcaagtccaccccctggagagccctgccatgatcagcctgacgccgcccaccaccgcaaccggcgtgttttcactgaaggcaagacccgggctgccaccgggcatcaacgtggccagcctggaatgggtgagcagggagccagcgctcctgtgtaccttcccaaacccatccgccccaagaaaggacagcaccctgtctgccgtgccccaatcatcttacccgctgctggcgaatggcgtatgcaagtggcccggatgtgaaaaggtgttcgaggagccggaagatttcctgaaacattgccaggccgaccacctgttggacgaaaagggaagggcccaatgcctgcttcagagggagatggtgcagagcttggagcaacaactcgtgctcgagaaggagaagctgagcgccatgcaggcacacctcgccggcaagatggccctgaccaaagccagtagcgtagccagctccgacaagggtagctgttgcatcgtggccgcaggaagtcaaggccccgttgtgcccgcctggagcggtccaagggaggcacccgactcactgttcgccgtgaggaggcatctgtggggcagccacggtaacagcacgttccccgagttcctgcataacatggactacttcaagttccacaacatgcggcctccattcacctacgccacactgataaggtgggctatcctggaggctcccgagaagcaaaggaccctgaacgagatctaccactggttcaccaggatgttcgctttctttaggaaccaccccgcgacctggaaaaacgccataaggcataacttgagccttcacaagtgcttcgtgagggtggagagtgagaaaggtgccgtgtggactgtggatgagttggagttccgcaagaagcgaagccaacgacctagcaggtgtagcaatccaacccccggaccctga

SEQ ID NO: 2309 - DNA, 1632 bp, synthetic construct
  misc_feature 1..1632: note = Description of Artificial Sequence: Synthetic Construct
  source 1..1632: mol_type = other DNA
atgggcgtgcaggttgagactataagcccaggcgacggcaggaccttccccaagaggggccagacatgcgtggtgcactacaccggcatgcttgaagacggcaaaaaggtggactcaagcagggacaggaacaagcccttcaagttcatgttgggcaaacaggaggtgatcagaggctgggaggagggtgttgcccagatgagcgtggggcagagggccaagctcacgataagtcccgattacgcctacggcgccaccggtcaccccggcatcatccccccacacgccaccctggtgttcgacgtggaattgctgaagcccgagtcaggtggcggtagtccgaacccaaggccagggaagccctctgctcctagcctggccctcggccccagccctggcgctagcccctcttggagggcggctccgaaggcttccgacctcctgggtgctaggggccctggtggaaccttccaaggcagggatctgcgaggaggggcgcacgcctctagctcaagcctgaacccgatgcccccctcacagctgcaactgcctaccctgccgctcgtcatggtggcccccagcggcgcaagactgggcccgttgccgcacctgcaagccttgctgcaggaccggccacatttcatgcaccagctcagcaccgtggacgcacatgcaaggacacccgtgctgcaagtccaccccctggagagccctgccatgatcagcctgacgccgcccaccaccgcaaccggcgtgttttcactgaaggcaagacccgggctgccaccgggcatcaacgtggccagcctggaatgggtgagcagggagccagcgctcctgtgtaccttcccaaacccatccgccccaagaaaggacagcaccctgtctgccgtgccccaatcatcttacccgctgctggcgaatggcgtatgcaagtggcccggatgtgaaaaggtgttcgaggagccggaagatttcctgaaacattgccaggccgaccacctgttggacgaaaagggaagggcccaatgcctgcttcagagggagatggtgcagagcttggagcaacaactcgtgctcgagaaggagaagctgagcgccatgcaggcacacctcgccggcaagatggccctgaccaaagccagtagcgtagccagctccgacaagggtagctgttgcatcgtggccgcaggaagtcaaggccccgttgtgcccgcctggagcggtccaagggaggcacccgactcactgttcgccgtgaggaggcatctgtggggcagccacggtaacagcacgttccccgagttcctgcataacatggactacttcaagttccacaacatgcggcctccattcacctacgccacactgataaggtgggctatcctggaggctcccgagaagcaaaggaccctgaacgagatctaccactggttcaccaggatgttcgctttctttaggaaccaccccgcgacctggaaaaacgccataaggcataacttgagccttcacaagtgcttcgtgagggtggagagtgagaaaggtgccgtgtggactgtggatgagttggagttccgcaagaagcgaagccaacgacctagcaggtgtagcaatccaacccccggaccctga

SEQ ID NO: 2310 - DNA, 1785 bp, synthetic construct
  misc_feature 1..1785: note = Description of Artificial Sequence: Synthetic Construct
  source 1..1785: mol_type = other DNA
atgatctctctgattgcggcgctggcagttgactacgttattggcatggaaaacgcgatgccatggaacctcccggctgacctggcgtggttcaaacgtaacaccctgaacaaacctgtgatcatgggtcgtcacacctgggaatctattggccgtcctctcccgggtcgtaaaaacatcattctgtcttctcagccaggcaccgacgaccgtgttacctgggttaaaagcgttgacgaagcgattgctgcgtgcggtgatgttcctgaaattatggtgatcggcggtggccgtgttatcgaacagttcctgccgaaagcgcagaaactgtacctgacccacatcgacgcggaagttgaaggtgacacccacttcccggactacgaaccggatgattgggagagcgtattctccgaattccatgatgcggatgcgcaaaactctcattcttactgttttgaaatcctggaacgtcgttcaggtggcggtagtccgaacccaaggccagggaagccctctgctcctagcctggccctcggccccagccctggcgctagcccctcttggagggcggctccgaaggcttccgacctcctgggtgctaggggccctggtggaaccttccaaggcagggatctgcgaggaggggcgcacgcctctagctcaagcctgaacccgatgcccccctcacagctgcaactgcctaccctgccgctcgtcatggtggcccccagcggcgcaagactgggcccgttgccgcacctgcaagccttgctgcaggaccggccacatttcatgcaccagctcagcaccgtggacgcacatgcaaggacacccgtgctgcaagtccaccccctggagagccctgccatgatcagcctgacgccgcccaccaccgcaaccggcgtgttttcactgaaggcaagacccgggctgccaccgggcatcaacgtggccagcctggaatgggtgagcagggagccagcgctcctgtgtaccttcccaaacccatccgccccaagaaaggacagcaccctgtctgccgtgccccaatcatcttacccgctgctggcgaatggcgtatgcaagtggcccggatgtgaaaaggtgttcgaggagccggaagatttcctgaaacattgccaggccgaccacctgttggacgaaaagggaagggcccaatgcctgcttcagagggagatggtgcagagcttggagcaacaactcgtgctcgagaaggagaagctgagcgccatgcaggcacacctcgccggcaagatggccctgaccaaagccagtagcgtagccagctccgacaagggtagctgttgcatcgtggccgcaggaagtcaaggccccgttgtgcccgcctggagcggtccaagggaggcacccgactcactgttcgccgtgaggaggcatctgtggggcagccacggtaacagcacgttccccgagttcctgcataacatggactacttcaagttccacaacatgcggcctccattcacctacgccacactgataaggtgggctatcctggaggctcccgagaagcaaaggaccctgaacgagatctaccactggttcaccaggatgttcgctttctttaggaaccaccccgcgacctggaaaaacgccataaggcataacttgagccttcacaagtgcttcgtgagggtggagagtgagaaaggtgccgtgtggactgtggatgagttggagttccgcaagaagcgaagccaacgacctagcaggtgtagcaatccaacccccggaccctga

SEQ ID NO: 2311 - DNA, 1623 bp, synthetic construct
  misc_feature 1..1623: note = Description of Artificial Sequence: Synthetic Construct
  source 1..1623: mol_type = other DNA
atgccgaacccaaggccagggaagccctctgctcctagcctggccctcggccccagccctggcgctagcccctcttggagggcggctccgaaggcttccgacctcctgggtgctaggggccctggtggaaccttccaaggcagggatctgcgaggaggggcgcacgcctctagctcaagcctgaacccgatgcccccctcacagctgcaactgcctaccctgccgctcgtcatggtggcccccagcggcgcaagactgggcccgttgccgcacctgcaagccttgctgcaggaccggccacatttcatgcaccagctcagcaccgtggacgcacatgcaaggacacccgtgctgcaagtccaccccctggagagccctgccatgatcagcctgacgccgcccaccaccgcaaccggcgtgttttcactgaaggcaagacccgggctgccaccgggcatcaacgtggccagcctggaatgggtgagcagggagccagcgctcctgtgtaccttcccaaacccatccgccccaagaaaggacagcaccctgtctgccgtgccccaatcatcttacccgctgctggcgaatggcgtatgcaagtggcccggatgtgaaaaggtgttcgaggagccggaagatttcctgaaacattgccaggccgaccacctgttggacgaaaagggaagggcccaatgcctgcttcagagggagatggtgcagagcttggagcaacaactcgtgctcgagaaggagaagctgagcgccatgcaggcacacctcgccggcaagatggccctgaccaaagccagtagcgtagccagctccgacaagggtagctgttgcatcgtggccgcaggaagtcaaggccccgttgtgcccgcctggagcggtccaagggaggcacccgactcactgttcgccgtgaggaggcatctgtggggcagccacggtaacagcacgttccccgagttcctgcataacatggactacttcaagttccacaacatgcggcctccattcacctacgccacactgataaggtgggctatcctggaggctcccgagaagcaaaggaccctgaacgagatctaccactggttcaccaggatgttcgctttctttaggaaccaccccgcgacctggaaaaacgccataaggcataacttgagccttcacaagtgcttcgtgagggtggagagtgagaaaggtgccgtgtggactgtggatgagttggagttccgcaagaagcgaagccaacgacctagcaggtgtagcaatccaacccccggacccagcggcggcgtgcaggttgagactataagcccaggcgacggcaggaccttccccaagaggggccagacatgcgtggtgcactacaccggcatgcttggcgacggcaaaaaggtggactcaagcagggacaggaacaagcccttcaagttcatgttgggcaaacaggaggtgatcagaggctgggaggagggtgttgcccagatgagcgtggggcagggcgccaagctcacgataagtcccgattacgcctacggcgccaccggtcaccccggcatcatccccccacacgccaccctggtgttcgacgtggaattgctggagctggagtga

SEQ ID NO: 2312 - DNA, 1776 bp, synthetic construct
  misc_feature 1..1776: note = Description of Artificial Sequence: Synthetic Construct
  source 1..1776: mol_type = other DNA
atgccgaacccaaggccagggaagccctctgctcctagcctggccctcggccccagccctggcgctagcccctcttggagggcggctccgaaggcttccgacctcctgggtgctaggggccctggtggaaccttccaaggcagggatctgcgaggaggggcgcacgcctctagctcaagcctgaacccgatgcccccctcacagctgcaactgcctaccctgccgctcgtcatggtggcccccagcggcgcaagactgggcccgttgccgcacctgcaagccttgctgcaggaccggccacatttcatgcaccagctcagcaccgtggacgcacatgcaaggacacccgtgctgcaagtccaccccctggagagccctgccatgatcagcctgacgccgcccaccaccgcaaccggcgtgttttcactgaaggcaagacccgggctgccaccgggcatcaacgtggccagcctggaatgggtgagcagggagccagcgctcctgtgtaccttcccaaacccatccgccccaagaaaggacagcaccctgtctgccgtgccccaatcatcttacccgctgctggcgaatggcgtatgcaagtggcccggatgtgaaaaggtgttcgaggagccggaagatttcctgaaacattgccaggccgaccacctgttggacgaaaagggaagggcccaatgcctgcttcagagggagatggtgcagagcttggagcaacaactcgtgctcgagaaggagaagctgagcgccatgcaggcacacctcgccggcaagatggccctgaccaaagccagtagcgtagccagctccgacaagggtagctgttgcatcgtggccgcaggaagtcaaggccccgttgtgcccgcctggagcggtccaagggaggcacccgactcactgttcgccgtgaggaggcatctgtggggcagccacggtaacagcacgttccccgagttcctgcataacatggactacttcaagttccacaacatgcggcctccattcacctacgccacactgataaggtgggctatcctggaggctcccgagaagcaaaggaccctgaacgagatctaccactggttcaccaggatgttcgctttctttaggaaccaccccgcgacctggaaaaacgccataaggcataacttgagccttcacaagtgcttcgtgagggtggagagtgagaaaggtgccgtgtggactgtggatgagttggagttccgcaagaagcgaagccaacgacctagcaggtgtagcaatccaacccccggacccagcggcatctctctgattgcggcgctggcagttgactacgttattggcatggaaaacgcgatgccatggaacctcccggctgacctggcgtggttcaaacgtaacaccctgaacaaacctgtgatcatgggtcgtcacacctgggaatctattggccgtcctctcccgggtcgtaaaaacatcattctgtcttctcagccaggcaccgacgaccgtgttacctgggttaaaagcgttgacgaagcgattgctgcgtgcggtgatgttcctgaaattatggtgatcggcggtggccgtgttatcgaacagttcctgccgaaagcgcagaaactgtacctgacccacatcgacgcggaagttgaaggtgacacccacttcccggactacgaaccggatgattgggagagcgtattctccgaattccatgatgcggatgcgcaaaactctcattcttactgttttgaaatcctggaacgtcgttga

SEQ ID NO: 2313 - DNA, 1518 bp, synthetic construct
  misc_feature 1..1518: note = Description of Artificial Sequence: Synthetic Construct
  source 1..1518: mol_type = other DNA
atgggcgtgcaggttgagactataagcccaggcgacggcaggaccttccccaagaggggccagacatgcgtggtgcactacaccggcatgcttgaagacggcaaaaaggtggactcaagcagggacaggaacaagcccttcaagttcatgttgggcaaacaggaggtgatcagaggctgggaggagggtgttgcccagatgagcgtggggcagagggccaagctcacgataagtcccgattacgcctacggcgccaccggtcaccccggcatcatccccccacacgccaccctggtgttcgacgtggaattgctgaagcccgagagcggcccgaacccaaggccagggaagccctctgctcctagcctggccctcggccccagccctggcgctagcccctcttggagggcggctccgaaggcttccgacctcctgggtgctaggggccctggtggaaccttccaaggcagggatctgcgaggaggggcgcacgcctctagctcaagcctgaacccgatgcccccctcacagctgcagctcagcaccgtggacgcacatgcaaggacacccgtgctgcaagtccaccccctggagagccctgccatgatcagcctgacgccgcccaccaccgcaaccggcgtgttttcactgaaggcaagacccgggctgccaccgggcatcaacgtggccagcctggaatgggtgagcagggagccagcgctcctgtgtaccttcccaaacccatccgccccaagaaaggacagcaccctgtctgccgtgccccaatcatcttacccgctgctggcgaatggcgtatgcaagtggcccggatgtgaaaaggtgttcgaggagccggaagatttcctgaaacattgccaggccgaccacctgttggacgaaaagggaagggcccaatgcctgcttcagagggagatggtgcagagcttggagcaacaactcgtgctcgagaaggagaagctgagcgccatgcaggcacacctcgccggcaagatggccctgaccaaagccagtagcgtagccagctccgacaagggtagctgttgcatcgtggccgcaggaagtcaaggccccgttgtgcccgcctggagcggtccaagggaggcacccgactcactgttcgccgtgaggaggcatctgtggggcagccacggtaacagcacgttccccgagttcctgcataacatggactacttcaagttccacaacatgcggcctccattcacctacgccacactgataaggtgggctatcctggaggctcccgagaagcaaaggaccctgaacgagatctaccactggttcaccaggatgttcgctttctttaggaaccaccccgcgacctggaaaaacgccataaggcataacttgagccttcacaagtgcttcgtgagggtggagagtgagaaaggtgccgtgtggactgtggatgagttggagttccgcaagaagcgaagccaacgacctagcaggtgtagcaatccaacccccggaccctga

SEQ ID NO: 2314 - DNA, 1671 bp, synthetic construct
  misc_feature 1..1671: note = Description of Artificial Sequence: Synthetic Construct
  source 1..1671: mol_type = other DNA
atgatctctctgattgcggcgctggcagttgactacgttattggcatggaaaacgcgatgccatggaacctcccggctgacctggcgtggttcaaacgtaacaccctgaacaaacctgtgatcatgggtcgtcacacctgggaatctattggccgtcctctcccgggtcgtaaaaacatcattctgtcttctcagccaggcaccgacgaccgtgttacctgggttaaaagcgttgacgaagcgattgctgcgtgcggtgatgttcctgaaattatggtgatcggcggtggccgtgttatcgaacagttcctgccgaaagcgcagaaactgtacctgacccacatcgacgcggaagttgaaggtgacacccacttcccggactacgaaccggatgattgggagagcgtattctccgaattccatgatgcggatgcgcaaaactctcattcttactgttttgaaatcctggaacgtcgtagcggcccgaacccaaggccagggaagccctctgctcctagcctggccctcggccccagccctggcgctagcccctcttggagggcggctccgaaggcttccgacctcctgggtgctaggggccctggtggaaccttccaaggcagggatctgcgaggaggggcgcacgcctctagctcaagcctgaacccgatgcccccctcacagctgcagctcagcaccgtggacgcacatgcaaggacacccgtgctgcaagtccaccccctggagagccctgccatgatcagcctgacgccgcccaccaccgcaaccggcgtgttttcactgaaggcaagacccgggctgccaccgggcatcaacgtggccagcctggaatgggtgagcagggagccagcgctcctgtgtaccttcccaaacccatccgccccaagaaaggacagcaccctgtctgccgtgccccaatcatcttacccgctgctggcgaatggcgtatgcaagtggcccggatgtgaaaaggtgttcgaggagccggaagatttcctgaaacattgccaggccgaccacctgttggacgaaaagggaagggcccaatgcctgcttcagagggagatggtgcagagcttggagcaacaactcgtgctcgagaaggagaagctgagcgccatgcaggcacacctcgccggcaagatggccctgaccaaagccagtagcgtagccagctccgacaagggtagctgttgcatcgtggccgcaggaagtcaaggccccgttgtgcccgcctggagcggtccaagggaggcacccgactcactgttcgccgtgaggaggcatctgtggggcagccacggtaacagcacgttccccgagttcctgcataacatggactacttcaagttccacaacatgcggcctccattcacctacgccacactgataaggtgggctatcctggaggctcccgagaagcaaaggaccctgaacgagatctaccactggttcaccaggatgttcgctttctttaggaaccaccccgcgacctggaaaaacgccataaggcataacttgagccttcacaagtgcttcgtgagggtggagagtgagaaaggtgccgtgtggactgtggatgagttggagttccgcaagaagcgaagccaacgacctagcaggtgtagcaatccaacccccggaccctga

SEQ ID NO: 2315 - DNA, 1518 bp, synthetic construct
  misc_feature 1..1518: note = Description of Artificial Sequence: Synthetic Construct
  source 1..1518: mol_type = other DNA
atgccgaacccaaggccagggaagccctctgctcctagcctggccctcggccccagccctggcgctagcccctcttggagggcggctccgaaggcttccgacctcctgggtgctaggggccctggtggaaccttccaaggcagggatctgcgaggaggggcgcacgcctctagctcaagcctgaacccgatgcccccctcacagctgcagctcagcaccgtggacgcacatgcaaggacacccgtgctgcaagtccaccccctggagagccctgccatgatcagcctgacgccgcccaccaccgcaaccggcgtgttttcactgaaggcaagacccgggctgccaccgggcatcaacgtggccagcctggaatgggtgagcagggagccagcgctcctgtgtaccttcccaaacccatccgccccaagaaaggacagcaccctgtctgccgtgccccaatcatcttacccgctgctggcgaatggcgtatgcaagtggcccggatgtgaaaaggtgttcgaggagccggaagatttcctgaaacattgccaggccgaccacctgttggacgaaaagggaagggcccaatgcctgcttcagagggagatggtgcagagcttggagcaacaactcgtgctcgagaaggagaagctgagcgccatgcaggcacacctcgccggcaagatggccctgaccaaagccagtagcgtagccagctccgacaagggtagctgttgcatcgtggccgcaggaagtcaaggccccgttgtgcccgcctggagcggtccaagggaggcacccgactcactgttcgccgtgaggaggcatctgtggggcagccacggtaacagcacgttccccgagttcctgcataacatggactacttcaagttccacaacatgcggcctccattcacctacgccacactgataaggtgggctatcctggaggctcccgagaagcaaaggaccctgaacgagatctaccactggttcaccaggatgttcgctttctttaggaaccaccccgcgacctggaaaaacgccataaggcataacttgagccttcacaagtgcttcgtgagggtggagagtgagaaaggtgccgtgtggactgtggatgagttggagttccgcaagaagcgaagccaacgacctagcaggtgtagcaatccaacccccggacccagcggcggcgtgcaggttgagactataagcccaggcgacggcaggaccttccccaagaggggccagacatgcgtggtgcactacaccggcatgcttggcgacggcaaaaaggtggactcaagcagggacaggaacaagcccttcaagttcatgttgggcaaacaggaggtgatcagaggctgggaggagggtgttgcccagatgagcgtggggcagggcgccaagctcacgataagtcccgattacgcctacggcgccaccggtcaccccggcatcatccccccacacgccaccctggtgttcgacgtggaattgctggagctggagtga

SEQ ID NO: 2316 - DNA, 1671 bp, synthetic construct
  misc_feature 1..1671: note = Description of Artificial Sequence: Synthetic Construct
  source 1..1671: mol_type = other DNA
atgccgaacccaaggccagggaagccctctgctcctagcctggccctcggccccagccctggcgctagcccctcttggagggcggctccgaaggcttccgacctcctgggtgctaggggccctggtggaaccttccaaggcagggatctgcgaggaggggcgcacgcctctagctcaagcctgaacccgatgcccccctcacagctgcagctcagcaccgtggacgcacatgcaaggacacccgtgctgcaagtccaccccctggagagccctgccatgatcagcctgacgccgcccaccaccgcaaccggcgtgttttcactgaaggcaagacccgggctgccaccgggcatcaacgtggccagcctggaatgggtgagcagggagccagcgctcctgtgtaccttcccaaacccatccgccccaagaaaggacagcaccctgtctgccgtgccccaatcatcttacccgctgctggcgaatggcgtatgcaagtggcccggatgtgaaaaggtgttcgaggagccggaagatttcctgaaacattgccaggccgaccacctgttggacgaaaagggaagggcccaatgcctgcttcagagggagatggtgcagagcttggagcaacaactcgtgctcgagaaggagaagctgagcgccatgcaggcacacctcgccggcaagatggccctgaccaaagccagtagcgtagccagctccgacaagggtagctgttgcatcgtggccgcaggaagtcaaggccccgttgtgcccgcctggagcggtccaagggaggcacccgactcactgttcgccgtgaggaggcatctgtggggcagccacggtaacagcacgttccccgagttcctgcataacatggactacttcaagttccacaacatgcggcctccattcacctacgccacactgataaggtgggctatcctggaggctcccgagaagcaaaggaccctgaacgagatctaccactggttcaccaggatgttcgctttctttaggaaccaccccgcgacctggaaaaacgccataaggcataacttgagccttcacaagtgcttcgtgagggtggagagtgagaaaggtgccgtgtggactgtggatgagttggagttccgcaagaagcgaagccaacgacctagcaggtgtagcaatccaacccccggacccagcggcatctctctgattgcggcgctggcagttgactacgttattggcatggaaaacgcgatgccatggaacctcccggctgacctggcgtggttcaaacgtaacaccctgaacaaacctgtgatcatgggtcgtcacacctgggaatctattggccgtcctctcccgggtcgtaaaaacatcattctgtcttctcagccaggcaccgacgaccgtgttacctgggttaaaagcgttgacgaagcgattgctgcgtgcggtgatgttcctgaaattatggtgatcggcggtggccgtgttatcgaacagttcctgccgaaagcgcagaaactgtacctgacccacatcgacgcggaagttgaaggtgacacccacttcccggactacgaaccggatgattgggagagcgtattctccgaattccatgatgcggatgcgcaaaactctcattcttactgttttgaaatcctggaacgtcgttga

SEQ ID NO: 2317 - protein, 21 aa, synthetic construct
  REGION 1..21: note = Description of Artificial Sequence: Synthetic peptide
LLLVTSLLLCELPHPAFLLIP

SEQ ID NO: 2318 - protein, 22 aa, synthetic construct
  REGION 1..22: note = Description of Artificial Sequence: Synthetic peptide
LLVTSLLLCELPHPAFLLIPDT

SEQ ID NO: 2319 - protein, 24 aa, synthetic construct
  REGION 1..24: note = Description of Artificial Sequence: Synthetic peptide
MVLLVTSLLLCELPHPAFLLIPDT

SEQ ID NO: 2320 - protein, 22 aa, Homo sapiens
MCHQQLVISWFSLVFLASPLVA

SEQ ID NO: 2321 - DNA, 66 bp, Homo sapiens; identical to SEQ ID NO: 1580
  source 1..66: mol_type = other DNA

SEQ ID NO: 2322 - DNA, 66 bp, synthetic construct; identical to SEQ ID NO: 1581
  misc_feature 1..66: note = Description of Artificial Sequence: Synthetic signal sequence
  source 1..66: mol_type = other DNA

SEQ ID NO: 2323 - DNA, 66 bp, synthetic construct; identical to SEQ ID NO: 1582
  misc_feature 1..66: note = Description of Artificial Sequence: Synthetic signal sequence
  source 1..66: mol_type = other DNA

SEQ ID NO: 2324 - DNA, 66 bp, synthetic construct; identical to SEQ ID NO: 1583
  misc_feature 1..66: note = Description of Artificial Sequence: Synthetic signal sequence
  source 1..66: mol_type = other DNA

SEQ ID NO: 2325 - DNA, 66 bp, synthetic construct; identical to SEQ ID NO: 1584
  misc_feature 1..66: note = Description of Artificial Sequence: Synthetic signal sequence
  source 1..66: mol_type = other DNA

SEQ ID NO: 2326 - DNA, 66 bp, synthetic construct; identical to SEQ ID NO: 1585
  misc_feature 1..66: note = Description of Artificial Sequence: Synthetic signal sequence
  source 1..66: mol_type = other DNA

SEQ ID NO: 2327 - DNA, 66 bp, synthetic construct; identical to SEQ ID NO: 1586
  misc_feature 1..66: note = Description of Artificial Sequence: Synthetic signal sequence
  source 1..66: mol_type = other DNA

SEQ ID NO: 2328 - DNA, 66 bp, synthetic construct; identical to SEQ ID NO: 1587
  misc_feature 1..66: note = Description of Artificial Sequence: Synthetic signal sequence
  source 1..66: mol_type = other DNA

SEQ ID NO: 2329 - DNA, 66 bp, synthetic construct; identical to SEQ ID NO: 1588
  misc_feature 1..66: note = Description of Artificial Sequence: Synthetic signal sequence
  source 1..66: mol_type = other DNA

SEQ ID NO: 2330 - protein, 22 aa, Homo sapiens
MCHQQLVISWFSLVFLASPLVA

SEQ ID NO: 2331 - DNA, 66 bp, Homo sapiens; identical to SEQ ID NO: 1580
  source 1..66: mol_type = other DNA

SEQ ID NO: 2332 - DNA, 66 bp, synthetic construct; identical to SEQ ID NO: 1581
  misc_feature 1..66: note = Description of Artificial Sequence: Synthetic Signal Sequence
  source 1..66: mol_type = other DNA

SEQ ID NO: 2333 - DNA, 66 bp, synthetic construct; identical to SEQ ID NO: 1582
  misc_feature 1..66: note = Description of Artificial Sequence: Synthetic Signal Sequence
  source 1..66: mol_type = other DNA

SEQ ID NO: 2334 - DNA, 66 bp, synthetic construct; identical to SEQ ID NO: 1583
  misc_feature 1..66: note = Description of Artificial Sequence: Synthetic Signal Sequence
  source 1..66: mol_type = other DNA

SEQ ID NO: 2335 - DNA, 66 bp, synthetic construct; identical to SEQ ID NO: 1584
  misc_feature 1..66: note = Description of Artificial Sequence: Synthetic Signal Sequence
  source 1..66: mol_type = other DNA

SEQ ID NO: 2336 - DNA, 66 bp, synthetic construct; identical to SEQ ID NO: 1585
  misc_feature 1..66: note = Description of Artificial Sequence: Synthetic Signal Sequence
  source 1..66: mol_type = other DNA

SEQ ID NO: 2337 - DNA, 66 bp, synthetic construct; identical to SEQ ID NO: 1586
  misc_feature 1..66: note = Description of Artificial Sequence: Synthetic Signal Sequence
  source 1..66: mol_type = other DNA

SEQ ID NO: 2338 - DNA, 66 bp, synthetic construct; identical to SEQ ID NO: 1587
  misc_feature 1..66: note = Description of Artificial Sequence: Synthetic Signal Sequence
  source 1..66: mol_type = other DNA

SEQ ID NO: 2339 - DNA, 66 bp, synthetic construct; identical to SEQ ID NO: 1588
  misc_feature 1..66: note = Description of Artificial Sequence: Synthetic Signal Sequence
  source 1..66: mol_type = other DNA

SEQ ID NO: 2340 - protein, 22 aa, synthetic construct
  REGION 1..22: note = Description of Artificial Sequence: Synthetic Signal Sequence
LLVTSLLLCELPHPAFLLIPDT

SEQ ID NO: 2341 - protein, 24 aa, synthetic construct
  REGION 1..24: note = Description of Artificial Sequence: Synthetic Signal Sequence
MVLLVTSLLLCELPHPAFLLIPDT

SEQ ID NO: 2342 - protein, 30 aa, synthetic construct; identical to SEQ ID NO: 1919
  REGION 1..30: note = Description of Artificial Sequence: Synthetic signal sequence

SEQ ID NO: 2343 - DNA, 90 bp, synthetic construct; identical to SEQ ID NO: 1724
  misc_feature 1..90: note = Description of Artificial Sequence: Synthetic signal sequence
  source 1..90: mol_type = other DNA

SEQ ID NO: 2344 - protein, 21 aa, Homo sapiens
MALPVTALLLPLALLLHAARP

SEQ ID NO: 2345 - DNA, 63 bp, Homo sapiens; identical to SEQ ID NO: 1321
  source 1..63: mol_type = other DNA

SEQ ID NO: 2346 - DNA, 63 bp, synthetic construct; identical to SEQ ID NO: 1322
  misc_feature 1..63: note = Description of Artificial Sequence: Synthetic signal sequence
  source 1..63: mol_type = other DNA

SEQ ID NO: 2347 - DNA, 63 bp, synthetic construct; identical to SEQ ID NO: 1323
  misc_feature 1..63: note = Description of Artificial Sequence: Synthetic signal sequence
  source 1..63: mol_type = other DNA

SEQ ID NO: 2348 - DNA, 63 bp, synthetic construct; identical to SEQ ID NO: 1324
  misc_feature 1..63: note = Description of Artificial Sequence: Synthetic signal sequence
  source 1..63: mol_type = other DNA

SEQ ID NO: 2349 - DNA, 63 bp, synthetic construct; identical to SEQ ID NO: 1325
  misc_feature 1..63: note = Description of Artificial Sequence: Synthetic signal sequence
  source 1..63: mol_type = other DNA

SEQ ID NO: 2350 - protein, 18 aa, Homo sapiens
MDWTWILFLVAAATRVHS

SEQ ID NO: 2351 - DNA, 54 bp, Homo sapiens; identical to SEQ ID NO: 1850
  source 1..54: mol_type = other DNA

SEQ ID NO: 2352 - protein, 30 aa, Homo sapiens; identical to SEQ ID NO: 1919

SEQ ID NO: 2353 - DNA, 90 bp, Homo sapiens; identical to SEQ ID NO: 1724
  source 1..90: mol_type = other DNA

SEQ ID NO: 2354 - protein, 9 aa, Homo sapiens
SARNRQKRS

SEQ ID NO: 2355 - DNA, 27 bp, Homo sapiens
  source 1..27: mol_type = other DNA
agcgccaggaatcgccagaagcggtcc

SEQ ID NO: 2356 - protein, 8 aa, Homo sapiens
ARNRQKRS

SEQ ID NO: 2357 - DNA, 24 bp, Homo sapiens
  source 1..24: mol_type = other DNA
gcccggaatagacagaagagatct

SEQ ID NO: 2358 - protein, 14 aa, synthetic construct
  REGION 1..14: note = Description of Artificial Sequence: Synthetic cleavage site
SGESRRVRRNKRSK

SEQ ID NO: 2359 - DNA, 42 bp, synthetic construct
  misc_feature 1..42: note = Description of Artificial Sequence: Synthetic cleavage site
  source 1..42: mol_type = other DNA
agtggtgagtccaggagagtgcggcgcaacaagaggagcaag

SEQ ID NO: 2360 - protein, 19 aa, synthetic construct
  REGION 1..19: note = Description of Artificial Sequence: Synthetic cleavage site
ATNFSLLKQAGDVEENPGP

SEQ ID NO: 2361 - DNA, 57 bp, synthetic construct
  misc_feature 1..57: note = Description of Artificial Sequence: Synthetic cleavage site
  source 1..57: mol_type = other DNA
gctactaacttcagcctgctgaagcaggctggagacgtggaggagaaccctggacct

SEQ ID NO: 2362 - protein, 4 aa, synthetic construct
  REGION 1..4: note = Description of Artificial Sequence: Synthetic peptide
NPGP

SEQ ID NO: 2363 - protein, 9 aa, Homo sapiens
SARNRQKRS

SEQ ID NO: 2364 - DNA, 27 bp, Homo sapiens
  source 1..27: mol_type = other DNA
agcgccaggaatcgccagaagcggtcc

SEQ ID NO: 2365 - protein, 8 aa, Homo sapiens
ARNRQKRS

SEQ ID NO: 2366 - DNA, 24 bp, Homo sapiens
  source 1..24: mol_type = other DNA
gcccggaatagacagaagagatct

SEQ ID NO: 2367 - protein, 12 aa, Homo sapiens
ESRRVRRNKRSK

SEQ ID NO: 2368 - DNA, 36 bp, synthetic construct; identical to SEQ ID NO: 1337
  misc_feature 1..36: note = Description of Artificial Sequence: Synthetic Cleavage site
  source 1..36: mol_type = other DNA

SEQ ID NO: 2369 - DNA, 36 bp, synthetic construct; identical to SEQ ID NO: 1338
  misc_feature 1..36: note = Description of Artificial Sequence: Synthetic Cleavage site
  source 1..36: mol_type = other DNA

SEQ ID NO: 2370 - DNA, 24 bp, synthetic construct
  misc_feature 1..24: note = Description of Artificial Sequence: Synthetic oligonucleotide
  source 1..24: mol_type = other DNA
gcccggaatagacagaagagatct

SEQ ID NO: 2371 - DNA, 36 bp, synthetic construct; identical to SEQ ID NO: 1339
  misc_feature 1..36: note = Description of Artificial Sequence: Synthetic Cleavage site
  source 1..36: mol_type = other DNA

SEQ ID NO: 2372 - protein, 14 aa, synthetic construct
  REGION 1..14: note = Description of Artificial Sequence: Synthetic Cleavage site
SGESRRVRRNKRSK

SEQ ID NO: 2373 - DNA, 57 bp, synthetic construct; identical to SEQ ID NO: 2361
  misc_feature 1..57: note = Description of Artificial Sequence: Synthetic Cleavage site
  source 1..57: mol_type = other DNA

SEQ ID NO: 2374 - protein, 19 aa, synthetic construct
  REGION 1..19: note = Description of Artificial Sequence: Synthetic Cleavage site
ATNFSLLKQAGDVEENPGP

SEQ ID NO: 2375 - protein, 20 aa, synthetic construct
  REGION 1..20: note = Description of Artificial Sequence: Synthetic Cleavage site
GATNFSLLKQAGDVEENPGP

SEQ ID NO: 2376 - DNA, 60 bp, synthetic construct; identical to SEQ ID NO: 1806
  misc_feature 1..60: note = Description of Artificial Sequence: Synthetic Cleavage site
  source 1..60: mol_type = other DNA

SEQ ID NO: 2377 - protein, 4 aa, synthetic construct
  REGION 1..4: note = Description of Artificial Sequence: Synthetic Cleavage site
NPGP

SEQ ID NO: 2378 - protein, 9 aa, Homo sapiens
SARNRQKRS

SEQ ID NO: 2379 - DNA, 27 bp, Homo sapiens
  source 1..27: mol_type = other DNA
agcgccaggaatcgccagaagcggtcc

SEQ ID NO: 2380 - protein, 8 aa, Homo sapiens
ARNRQKRS

SEQ ID NO: 2381 - DNA, 24 bp, Homo sapiens
  source 1..24: mol_type = other DNA
gcccggaatagacagaagagatct

SEQ ID NO: 2382 - protein, 12 aa, Homo sapiens
ESRRVRRNKRSK

SEQ ID NO: 2383 - DNA, 36 bp, synthetic construct; identical to SEQ ID NO: 1337
  misc_feature 1..36: note = Description of Artificial Sequence: Synthetic cleavage site
  source 1..36: mol_type = other DNA

SEQ ID NO: 2384 - DNA, 36 bp, synthetic construct; identical to SEQ ID NO: 1338
  misc_feature 1..36: note = Description of Artificial Sequence: Synthetic cleavage site
  source 1..36: mol_type = other DNA

SEQ ID NO: 2385 - DNA, 36 bp, synthetic construct; identical to SEQ ID NO: 1339
  misc_feature 1..36: note = Description of Artificial Sequence: Synthetic cleavage site
  source 1..36: mol_type = other DNA

SEQ ID NO: 2386 - protein, 9 aa, synthetic construct
  REGION 1..9: note = Description of Artificial Sequence: Synthetic HA Tag
YPYDVPDYA

SEQ ID NO: 2387 - DNA, 27 bp, synthetic construct
  misc_feature 1..27: note = Description of Artificial Sequence: Synthetic HA Tag
  source 1..27: mol_type = other DNA
tacccatacgatgttccagattacgct

SEQ ID NO: 2388 - DNA, 27 bp, synthetic construct
  misc_feature 1..27: note = Description of Artificial Sequence: Synthetic HA Tag
  source 1..27: mol_type = other DNA
tatccttacgatgtgcccgactatgct

SEQ ID NO: 2389 - DNA, 27 bp, synthetic construct
  misc_feature 1..27: note = Description of Artificial Sequence: Synthetic HA Tag
  source 1..27: mol_type = other DNA
tatccgtacgacgtaccagactacgca

SEQ ID NO: 2390 - protein, 4 aa, synthetic construct
  REGION 1..4: note = Description of Artificial Sequence: Synthetic linker
GGSG

SEQ ID NO: 2391 - DNA, 12 bp, synthetic construct
  misc_feature 1..12: note = Description of Artificial Sequence: Synthetic linker
  source 1..12: mol_type = other DNA
ggaggatctgga

SEQ ID NO: 2392 - DNA, 27 bp, synthetic construct
  misc_feature 1..27: note = Description of Artificial Sequence: Synthetic linker
  source 1..27: mol_type = other DNA
ggaggtagtggtggaggcagtggtgga

SEQ ID NO: 2393 - protein, 5 aa, synthetic construct
  REGION 1..5: note = Description of Artificial Sequence: Synthetic linker
GGGGG

SEQ ID NO: 2394 - protein, 5 aa, synthetic construct
  REGION 1..5: note = Description of Artificial Sequence: Synthetic linker
GGGGS

SEQ ID NO: 2395 - protein, 10 aa, synthetic construct
  REGION 1..10: note = Description of Artificial Sequence: Synthetic linker
GGGGSGGGGS

SEQ ID NO: 2396 - protein, 15 aa, synthetic construct
  REGION 1..15: note = Description of Artificial Sequence: Synthetic linker
GGGGSGGGGSGGGGS

SEQ ID NO: 2397 - protein, 20 aa, synthetic construct
  REGION 1..20: note = Description of Artificial Sequence: Synthetic linker
GGGGSGGGGSGGGGSGGGGS

SEQ ID NO: 2398 - protein, 25 aa, synthetic construct
  REGION 1..25: note = Description of Artificial Sequence: Synthetic linker
GGGGSGGGGSGGGGSGGGGSGGGGS

SEQ ID NO: 2399 - protein, 30 aa, synthetic construct
  REGION 1..30: note = Description of Artificial Sequence: Synthetic linker
GGGGSGGGGSGGGGSGGGGSGGGGSGGGGS

SEQ ID NO: 2400 - protein, 5 aa, synthetic construct
  REGION 1..5: note = Description of Artificial Sequence: Synthetic linker
SSSSG

SEQ ID NO: 2401 - protein, 10 aa, synthetic construct
  REGION 1..10: note = Description of Artificial Sequence: Synthetic linker
SSSSGSSSSG

SEQ ID NO: 2402 - protein, 15 aa, synthetic construct
  REGION 1..15: note = Description of Artificial Sequence: Synthetic linker
SSSSGSSSSGSSSSG

SEQ ID NO: 2403 - protein, 20 aa, synthetic construct
  REGION 1..20: note = Description of Artificial Sequence: Synthetic linker
SSSSGSSSSGSSSSGSSSSG

SEQ ID NO: 2404 - protein, 25 aa, synthetic construct
  REGION 1..25: note = Description of Artificial Sequence: Synthetic linker
SSSSGSSSSGSSSSGSSSSGSSSSG

SEQ ID NO: 2405 - protein, 30 aa, synthetic construct
  REGION 1..30: note = Description of Artificial Sequence: Synthetic linker
SSSSGSSSSGSSSSGSSSSGSSSSGSSSSG

SEQ ID NO: 2406 - protein, 6 aa, synthetic construct
  REGION 1..6: note = Description of Artificial Sequence: Synthetic linker
EFSTEF

SEQ ID NO: 2407 - DNA, 18 bp, synthetic construct
  misc_feature 1..18: note = Description of Artificial Sequence: Synthetic linker
  source 1..18: mol_type = other DNA
gagttcagcaccgagttt

SEQ ID NO: 2408 - DNA, 18 bp, synthetic construct
  misc_feature 1..18: note = Description of Artificial Sequence: Synthetic linker
  source 1..18: mol_type = other DNA
gagttctccaccgagttc

SEQ ID NO: 2409 - protein, 5 aa, synthetic construct
  REGION 1..5: note = Description of Artificial Sequence: Synthetic linker
SGGGS

SEQ ID NO: 2410 - DNA, 15 bp, synthetic construct
  misc_feature 1..15: note = Description of Artificial Sequence: Synthetic linker
  source 1..15: mol_type = other DNA
agcggcggtggcagc

SEQ ID NO: 2411 - protein, 12 aa, synthetic construct
  REGION 1..12: note = Description of Artificial Sequence: Synthetic linker
GKSSGSGSESKS

SEQ ID NO: 2412 - protein, 15 aa, synthetic construct
  REGION 1..15: note = Description of Artificial Sequence: Synthetic linker
GGSTSGSGKSSEGKG

SEQ ID NO: 2413 - protein, 19 aa, synthetic construct
  REGION 1..19: note = Description of Artificial Sequence: Synthetic linker
GSTSGSGKSSSEGSGSTKG

SEQ ID NO: 2414 - protein, 18 aa, synthetic construct
  REGION 1..18: note = Description of Artificial Sequence: Synthetic linker
GSTSGSGKPGSGEGSTKG

SEQ ID NO: 2415 - protein, 13 aa, synthetic construct
  REGION 1..13: note = Description of Artificial Sequence: Synthetic linker
VDYPYDVPDYALD

SEQ ID NO: 2416 - DNA, 39 bp, synthetic construct; identical to SEQ ID NO: 2274
  misc_feature 1..39: note = Description of Artificial Sequence: Synthetic linker
  source 1..39: mol_type = other DNA

SEQ ID NO: 2417 - protein, 14 aa, synthetic construct
  REGION 1..14: note = Description of Artificial Sequence: Synthetic linker
EGKSSGSGSESKEF

SEQ ID NO: 2418 - protein, 35 aa, synthetic construct
  REGION 1..35: note = Description of Artificial Sequence: Synthetic linker
SGGGSGGGGSGGGGSGGGGSGGGSLQYPYDVPDYA

SEQ ID NO: 2419 - DNA, 105 bp, synthetic construct
  misc_feature 1..105: note = Description of Artificial Sequence: Synthetic linker
  source 1..105: mol_type = other DNA
tcaggtggcggtagtggtgggggaggatctggaggcggaggaagcgggggtggaggttcaggtggaggcagcttgcaatacccatacgatgttccagattacgct

SEQ ID NO: 2420 - protein, 8 aa, synthetic construct
  REGION 1..8: note = Description of Artificial Sequence: Synthetic linker
DYKDDDDK

SEQ ID NO: 2421 - DNA, 24 bp, synthetic construct
  misc_feature 1..24: note = Description of Artificial Sequence: Synthetic linker
  source 1..24: mol_type = other DNA
gactacaaagacgatgacgacaag

SEQ ID NO: 2422 - protein, 34 aa, synthetic construct; identical to SEQ ID NO: 1924
  REGION 1..34: note = Description of Artificial Sequence: Synthetic linker

SEQ ID NO: 2423 - DNA, 102 bp, synthetic construct; identical to SEQ ID NO: 1925
  misc_feature 1..102: note = Description of Artificial Sequence: Synthetic linker
  source 1..102: mol_type = other DNA

SEQ ID NO: 2424 - protein, 34 aa, synthetic construct
  REGION 1..34: note = Description of Artificial Sequence: Synthetic linker
SGGGSGGGGSGGGGSGGGGSYPYDVPDYASGGGS

SEQ ID NO: 2425 - DNA, 102 bp, synthetic construct
  misc_feature 1..102: note = Description of Artificial Sequence: Synthetic linker
  source 1..102: mol_type = other DNA
agtggtggcgggtccggcggtggtggtagcgggggtggaggctcaggtggcggtggcagttatccttacgatgtgcccgactatgcttcaggcggggggagt

SEQ ID NO: 2426 - protein, 22 aa, synthetic construct
  REGION 1..22: note = Description of Artificial Sequence: Synthetic linker
GSGATNFSLLKQAGDVEENPGP

SEQ ID NO: 2427 - DNA, 66 bp, synthetic construct
  misc_feature 1..66: note = Description of Artificial Sequence: Synthetic linker
  source 1..66: mol_type = other DNA
ggttcaggagctactaacttcagcctgctgaagcaggctggagacgtggaggagaaccctggacct

SEQ ID NO: 2428 - protein, 22 aa, synthetic construct
  REGION 1..22: note = Description of Artificial Sequence: Synthetic linker
SGGGGSGGGGSGGGGSGGGSLQ

SEQ ID NO: 2429 - protein, 14 aa, synthetic construct
  REGION 1..14: note = Description of Artificial Sequence: Synthetic linker
EGKSSGSGSESKEF

SEQ ID NO: 2430 - protein, 35 aa, synthetic construct; identical to SEQ ID NO: 2418
  REGION 1..35: note = Description of Artificial Sequence: Synthetic linker

SEQ ID NO: 2431 - DNA, 105 bp, synthetic construct; identical to SEQ ID NO: 2419
  misc_feature 1..105: note = Description of Artificial Sequence: Synthetic linker
  source 1..105: mol_type = other DNA

SEQ ID NO: 2432 - protein, 8 aa, synthetic construct
  REGION 1..8: note = Description of Artificial Sequence: Synthetic linker
DYKDDDDK

SEQ ID NO: 2433 - DNA, 24 bp, synthetic construct
  misc_feature 1..24: note = Description of Artificial Sequence: Synthetic linker
  source 1..24: mol_type = other DNA
gactacaaagacgatgacgacaag

SEQ ID NO: 2434 - protein, 34 aa, synthetic construct; identical to SEQ ID NO: 1924
  REGION 1..34: note = Description of Artificial Sequence: Synthetic linker

SEQ ID NO: 2435 - DNA, 102 bp, synthetic construct; identical to SEQ ID NO: 1925
  misc_feature 1..102: note = Description of Artificial Sequence: Synthetic linker
  source 1..102: mol_type = other DNA

SEQ ID NO: 2436 - protein, 34 aa, synthetic construct; identical to SEQ ID NO: 2424
  REGION 1..34: note = Description of Artificial Sequence: Synthetic linker

SEQ ID NO: 2437 - DNA, 102 bp, synthetic construct; identical to SEQ ID NO: 2425
  misc_feature 1..102: note = Description of Artificial Sequence: Synthetic linker
  source 1..102: mol_type = other DNA

SEQ ID NO: 2438 - protein, 22 aa, synthetic construct
  REGION 1..22: note = Description of Artificial Sequence: Synthetic linker
GSGATNFSLLKQAGDVEENPGP

SEQ ID NO: 2439 - DNA, 66 bp, synthetic construct; identical to SEQ ID NO: 2427
  misc_feature 1..66: note = Description of Artificial Sequence: Synthetic linker
  source 1..66: mol_type = other DNA

SEQ ID NO: 2440 - protein, 4 aa, synthetic construct
  REGION 1..4: note = Description of Artificial Sequence: Synthetic linker
GGSG

SEQ ID NO: 2441 - DNA, 12 bp, synthetic construct
  misc_feature 1..12: note = Description of Artificial Sequence: Synthetic linker
  source 1..12: mol_type = other DNA
ggaggatctgga

SEQ ID NO: 2442 - protein, 5 aa, synthetic construct
  REGION 1..5: note = Description of Artificial Sequence: Synthetic linker
GGSGG

SEQ ID NO: 2443 - DNA, 15 bp, synthetic construct
  misc_feature 1..15: note = Description of Artificial Sequence: Synthetic linker
  source 1..15: mol_type = other DNA
ggaggcagcggagga

SEQ ID NO: 2444 - DNA, 15 bp, synthetic construct
  misc_feature 1..15: note = Description of Artificial Sequence: Synthetic linker
  source 1..15: mol_type = other DNA
ggaggctctggagga

SEQ ID NO: 2445 - DNA, 15 bp, synthetic construct
  misc_feature 1..15: note = Description of Artificial Sequence: Synthetic linker
  source 1..15: mol_type = other DNA
ggaggctccggcgga

SEQ ID NO: 2446 - DNA, 15 bp, synthetic construct
  misc_feature 1..15: note = Description of Artificial Sequence: Synthetic linker
  source 1..15: mol_type = other DNA
ggaggatccggaggc

SEQ ID NO: 2447 - DNA, 15 bp, synthetic construct
  misc_feature 1..15: note = Description of Artificial Sequence: Synthetic linker
  source 1..15: mol_type = other DNA
ggaggatctggagga

SEQ ID NO: 2448 - protein, 6 aa, synthetic construct
  REGION 1..6: note = Description of Artificial Sequence: Synthetic linker
GGSGGG

SEQ ID NO: 2449 - DNA, 18 bp, synthetic construct
  misc_feature 1..18: note = Description of Artificial Sequence: Synthetic linker
  source 1..18: mol_type = other DNA
ggtggctctggtggtggt

SEQ ID NO: 2450 - DNA, 18 bp, synthetic construct
  misc_feature 1..18: note = Description of Artificial Sequence: Synthetic linker
  source 1..18: mol_type = other DNA
ggaggtagtggtggaggc

SEQ ID NO: 2451 - protein, 9 aa, synthetic construct
  REGION 1..9: note = Description of Artificial Sequence: Synthetic linker
GGSGGGSGG

SEQ ID NO: 2452 - DNA, 27 bp, synthetic construct
  misc_feature 1..27: note = Description of Artificial Sequence: Synthetic linker
  source 1..27: mol_type = other DNA
ggaggtagtggtggaggcagtggtgga

SEQ ID NO: 2453 - protein, 5 aa, synthetic construct
  REGION 1..5: note = Description of Artificial Sequence: Synthetic linker
GGGGG

SEQ ID NO: 2454 - protein, 5 aa, synthetic construct
  REGION 1..5: note = Description of Artificial Sequence: Synthetic linker
GGGGS

SEQ ID NO: 2455 - protein, 10 aa, synthetic construct
  REGION 1..10: note = Description of Artificial Sequence: Synthetic linker
GGGGSGGGGS

SEQ ID NO: 2456 - protein, 15 aa, synthetic construct
  REGION 1..15: note = Description of Artificial Sequence: Synthetic linker
GGGGSGGGGSGGGGS

SEQ ID NO: 2457 - DNA, 45 bp, synthetic construct; identical to SEQ ID NO: 1636
  misc_feature 1..45: note = Description of Artificial Sequence: Synthetic linker
  source 1..45: mol_type = other DNA

SEQ ID NO: 2458 - DNA, 45 bp, synthetic construct; identical to SEQ ID NO: 1637
  misc_feature 1..45: note = Description of Artificial Sequence: Synthetic linker
  source 1..45: mol_type = other DNA

SEQ ID NO: 2459 - protein, 26 aa, synthetic construct
  REGION 1..26: note = Description of Artificial Sequence: Synthetic linker
SGGGSGGGGSGGGGSGGGGSGGGSLQ

SEQ ID NO: 2460 - DNA, 45 bp, synthetic construct; identical to SEQ ID NO: 1639
  misc_feature 1..45: note = Description of Artificial Sequence: Synthetic linker
  source 1..45: mol_type = other DNA

SEQ ID NO: 2461 - DNA, 45 bp, synthetic construct; identical to SEQ ID NO: 1640
  misc_feature 1..45: note = Description of Artificial Sequence: Synthetic linker
  source 1..45: mol_type = other DNA

SEQ ID NO: 2462 - DNA, 45 bp, synthetic construct; identical to SEQ ID NO: 1641
  misc_feature 1..45: note = Description of Artificial Sequence: Synthetic linker
  source 1..45: mol_type = other DNA

SEQ ID NO: 2463 - protein, 20 aa, synthetic construct
  REGION 1..20: note = Description of Artificial Sequence: Synthetic linker
GGGGSGGGGSGGGGSGGGGS

SEQ ID NO: 2464 - protein, 25 aa, synthetic construct
  REGION 1..25: note = Description of Artificial Sequence: Synthetic linker
GGGGSGGGGSGGGGSGGGGSGGGGS

SEQ ID NO: 2465 - protein, 30 aa, synthetic construct; identical to SEQ ID NO: 2399
  REGION 1..30: note = Description of Artificial Sequence: Synthetic linker

SEQ ID NO: 2466 - protein, 5 aa, synthetic construct
  REGION 1..5: note = Description of Artificial Sequence: Synthetic linker
SSSSG

SEQ ID NO: 2467 - protein, 10 aa, synthetic construct
  REGION 1..10: note = Description of Artificial Sequence: Synthetic linker
SSSSGSSSSG

SEQ ID NO: 2468 - protein, 15 aa, synthetic construct
  REGION 1..15: note = Description of Artificial Sequence: Synthetic linker
SSSSGSSSSGSSSSG

SEQ ID NO: 2469 - protein, 20 aa, synthetic construct
  REGION 1..20: note = Description of Artificial Sequence: Synthetic linker
SSSSGSSSSGSSSSGSSSSG

SEQ ID NO: 2470 - protein, 25 aa, synthetic construct
  REGION 1..25: note = Description of Artificial Sequence: Synthetic linker
SSSSGSSSSGSSSSGSSSSGSSSSG

SEQ ID NO: 2471 - protein, 30 aa, synthetic construct; identical to SEQ ID NO: 2405
  REGION 1..30: note = Description of Artificial Sequence: Synthetic linker

SEQ ID NO: 2472 - DNA, 78 bp, synthetic construct; identical to SEQ ID NO: 1647
  misc_feature 1..78: note = Description of Artificial Sequence: Synthetic linker
  source 1..78: mol_type = other DNA

SEQ ID NO: 2473 - DNA, 78 bp, synthetic construct; identical to SEQ ID NO: 1648
  misc_feature 1..78: note = Description of Artificial Sequence: Synthetic linker
  source 1..78: mol_type = other DNA

SEQ ID NO: 2474 - DNA, 78 bp, synthetic construct; identical to SEQ ID NO: 1649
  misc_feature 1..78: note = Description of Artificial Sequence: Synthetic linker
  source 1..78: mol_type = other DNA

SEQ ID NO: 2475 - DNA, 78 bp, synthetic construct; identical to SEQ ID NO: 1650
  misc_feature 1..78: note = Description of Artificial Sequence: Synthetic linker
  source 1..78: mol_type = other DNA

SEQ ID NO: 2476 - DNA, 78 bp, synthetic construct; identical to SEQ ID NO: 1651
  misc_feature 1..78: note = Description of Artificial Sequence: Synthetic linker
  source 1..78: mol_type = other DNA

SEQ ID NO: 2477 - DNA, 78 bp, synthetic construct; identical to SEQ ID NO: 1652
  misc_feature 1..78: note = Description of Artificial Sequence: Synthetic linker
  source 1..78: mol_type = other DNA

SEQ ID NO: 2478 - DNA, 78 bp, synthetic construct; identical to SEQ ID NO: 1650
  misc_feature 1..78: note = Description of Artificial Sequence: Synthetic linker
  source 1..78: mol_type = other DNA

SEQ ID NO: 2479 - DNA, 18 bp, synthetic construct
  misc_feature 1..18: note = Description of Artificial Sequence: Synthetic linker
  source 1..18: mol_type = other DNA
gagttctccaccgagttc

SEQ ID NO: 2480 - protein, 12 aa, synthetic construct
  REGION 1..12: note = Description of Artificial Sequence: Synthetic linker
GKSSGSGSESKS

SEQ ID NO: 2481 - protein, 15 aa, synthetic construct
  REGION 1..15: note = Description of Artificial Sequence: Synthetic linker
GGSTSGSGKSSEGKG

SEQ ID NO: 2482 - protein, 19 aa, synthetic construct
  REGION 1..19: note = Description of Artificial Sequence: Synthetic linker
GSTSGSGKSSSEGSGSTKG

SEQ ID NO: 2483 - protein, 18 aa, synthetic construct
  REGION 1..18: note = Description of Artificial Sequence: Synthetic linker
GSTSGSGKPGSGEGSTKG

SEQ ID NO: 2484 - protein, 20 aa, synthetic construct
  REGION 1..20: note = Description of Artificial Sequence: Synthetic linker
SGGGSGGGGSGGGGSGGGGS

SEQ ID NO: 2485 - protein, 4 aa, synthetic construct
  REGION 1..4: note = Description of Artificial Sequence: Synthetic linker
GGGG

SEQ ID NO: 2486 - protein, 8 aa, synthetic construct
  REGION 1..8: note = Description of Artificial Sequence: Synthetic linker
GGGGGGGG

SEQ ID NO: 2487 - protein, 8 aa, synthetic construct
  REGION 1..8: note = Description of Artificial Sequence: Synthetic linker
  MOD_RES 4: note = Any naturally occurring amino acid
DVEXNPGP

SEQ ID NO: 2488 - protein, 8 aa, synthetic construct
  REGION 1..8: note = Description of Artificial Sequence: Synthetic linker
  MOD_RES 4: note = Any naturally occurring amino acid
DIEXNPGP

SEQ ID NO: 2489 - DNA, 561 bp, synthetic construct; identical to SEQ ID NO: 73
  misc_feature 1..561: note = Description of Artificial Sequence: Synthetic destabilizing domain (DD)
  source 1..561: mol_type = other DNA

SEQ ID NO: 2490 - DNA, 561 bp, synthetic construct; identical to SEQ ID NO: 76
  misc_feature 1..561: note = Description of Artificial Sequence: Synthetic destabilizing domain (DD)
  source 1..561: mol_type = other DNA

SEQ ID NO: 2491 - DNA, 561 bp, synthetic construct; identical to SEQ ID NO: 82
  misc_feature 1..561: note = Description of Artificial Sequence: Synthetic destabilizing domain (DD)
  source 1..561: mol_type = other DNA

SEQ ID NO: 2492 - DNA, 561 bp, synthetic construct; identical to SEQ ID NO: 74
  misc_feature 1..561: note = Description of Artificial Sequence: Synthetic destabilizing domain (DD)
  source 1..561: mol_type = other DNA

SEQ ID NO: 2493 - DNA, 561 bp, synthetic construct; identical to SEQ ID NO: 84
  misc_feature 1..561: note = Description of Artificial Sequence: Synthetic destabilizing domain (DD)
  source 1..561: mol_type = other DNA

SEQ ID NO: 2494 - DNA, 561 bp, synthetic construct; identical to SEQ ID NO: 78
  misc_feature 1..561: note = Description of Artificial Sequence: Synthetic destabilizing domain (DD)
  source 1..561: mol_type = other DNA

SEQ ID NO: 2495 - DNA, 561 bp, synthetic construct; identical to SEQ ID NO: 75
  misc_feature 1..561: note = Description of Artificial Sequence: Synthetic destabilizing domain (DD)
  source 1..561: mol_type = other DNA

SEQ ID NO: 2496 - DNA, 561 bp, synthetic construct; identical to SEQ ID NO: 79
  misc_feature 1..561: note = Description of Artificial Sequence: Synthetic destabilizing domain (DD)
  source 1..561: mol_type = other DNA

SEQ ID NO: 2497 - DNA, 561 bp, synthetic construct; identical to SEQ ID NO: 81
  misc_feature 1..561: note = Description of Artificial Sequence: Synthetic destabilizing domain (DD)
  source 1..561: mol_type = other DNA

SEQ ID NO: 2498 - DNA, 561 bp, synthetic construct; identical to SEQ ID NO: 93
  misc_feature 1..561: note = Description of Artificial Sequence: Synthetic destabilizing domain (DD)
  source 1..561: mol_type = other DNA

SEQ ID NO: 2499 - DNA, 561 bp, synthetic construct; identical to SEQ ID NO: 92
  misc_feature 1..561: note = Description of Artificial Sequence: Synthetic destabilizing domain (DD)
  source 1..561: mol_type = other DNA

SEQ ID NO: 2500 - DNA, 561 bp, synthetic construct; identical to SEQ ID NO: 94
  misc_feature 1..561: note = Description of Artificial Sequence: Synthetic destabilizing domain (DD)
  source 1..561: mol_type = other DNA

SEQ ID NO: 2501 - DNA, 561 bp, synthetic construct; identical to SEQ ID NO: 90
  misc_feature 1..561: note = Description of Artificial Sequence: Synthetic destabilizing domain (DD)
  source 1..561: mol_type = other DNA

SEQ ID NO: 2502 - DNA, 561 bp, synthetic construct; identical to SEQ ID NO: 96
  misc_feature 1..561: note = Description of Artificial Sequence: Synthetic destabilizing domain (DD)
  source 1..561: mol_type = other DNA

SEQ ID NO: 2503 - DNA, 561 bp, synthetic construct; identical to SEQ ID NO: 98
  misc_feature 1..561: note = Description of Artificial Sequence: Synthetic destabilizing domain (DD)
  source 1..561: mol_type = other DNA

SEQ ID NO: 2504 - DNA, 561 bp, synthetic construct; identical to SEQ ID NO: 110
  misc_feature 1..561: note = Description of Artificial Sequence: Synthetic destabilizing domain (DD)
  source 1..561: mol_type = other DNA

SEQ ID NO: 2505 - DNA, 561 bp, synthetic construct; identical to SEQ ID NO: 99
  misc_feature 1..561: note = Description of Artificial Sequence: Synthetic destabilizing domain (DD)
  source 1..561: mol_type = other DNA

SEQ ID NO: 2506 - DNA, 561 bp, synthetic construct; identical to SEQ ID NO: 103
  misc_feature 1..561: note = Description of Artificial Sequence: Synthetic destabilizing domain (DD)
  source 1..561: mol_type = other DNA

SEQ ID NO: 2507 - DNA, 561 bp, synthetic construct; identical to SEQ ID NO: 97
  misc_feature 1..561: note = Description of Artificial Sequence: Synthetic destabilizing domain (DD)
  source 1..561: mol_type = other DNA

SEQ ID NO: 2508 - DNA, 561 bp, synthetic construct; identical to SEQ ID NO: 95
  misc_feature 1..561: note = Description of Artificial Sequence: Synthetic destabilizing domain (DD)
  source 1..561: mol_type = other DNA

SEQ ID NO: 2509 - DNA, 561 bp, synthetic construct; identical to SEQ ID NO: 112
  misc_feature 1..561: note = Description of Artificial Sequence: Synthetic destabilizing domain (DD)
  source 1..561: mol_type = other DNA

SEQ ID NO: 2510 - DNA, 561 bp, synthetic construct; identical to SEQ ID NO: 111
  misc_feature 1..561: note = Description of Artificial Sequence: Synthetic destabilizing domain (DD)
  source 1..561: mol_type = other DNA

SEQ ID NO: 2511 - DNA, 561 bp, synthetic construct; identical to SEQ ID NO: 100
  misc_feature 1..561: note = Description of Artificial Sequence: Synthetic destabilizing domain (DD)
  source 1..561: mol_type = other DNA

SEQ ID NO: 2512 - DNA, 561 bp, synthetic construct; identical to SEQ ID NO: 108
  misc_feature 1..561: note = Description of Artificial Sequence: Synthetic destabilizing domain (DD)
  source 1..561: mol_type = other DNA

SEQ ID NO: 2513 - DNA, 561 bp, synthetic construct; identical to SEQ ID NO: 113
  misc_feature 1..561: note = Description of Artificial Sequence: Synthetic destabilizing domain (DD)
  source 1..561: mol_type = other DNA

SEQ ID NO: 2514 - DNA, 561 bp, synthetic construct; identical to SEQ ID NO: 91
  misc_feature 1..561: note = Description of Artificial Sequence: Synthetic destabilizing domain (DD)
  source 1..561: mol_type = other DNA

SEQ ID NO: 2515 - DNA, 561 bp, synthetic construct; identical to SEQ ID NO: 101
  misc_feature 1..561: note = Description of Artificial Sequence: Synthetic destabilizing domain (DD)
  source 1..561: mol_type = other DNA

SEQ ID NO: 2516 - DNA, 561 bp, synthetic construct; identical to SEQ ID NO: 105
  misc_feature 1..561: note = Description of Artificial Sequence: Synthetic destabilizing domain (DD)
  source 1..561: mol_type = other DNA

SEQ ID NO: 2517 - DNA, 561 bp, synthetic construct; identical to SEQ ID NO: 102
  misc_feature 1..561: note = Description of Artificial Sequence: Synthetic destabilizing domain (DD)
  source 1..561: mol_type = other DNA

SEQ ID NO: 2518 - DNA, 561 bp, synthetic construct; identical to SEQ ID NO: 104
  misc_feature 1..561: note = Description of Artificial Sequence: Synthetic destabilizing domain (DD)
  source 1..561: mol_type = other DNA

SEQ ID NO: 2519 - DNA, 561 bp, synthetic construct; identical to SEQ ID NO: 106
  misc_feature 1..561: note = Description of Artificial Sequence: Synthetic destabilizing domain (DD)
  source 1..561: mol_type = other DNA

SEQ ID NO: 2520 - DNA, 561 bp, synthetic construct; identical to SEQ ID NO: 109
  misc_feature 1..561: note = Description of Artificial Sequence: Synthetic destabilizing domain (DD)
  source 1..561: mol_type = other DNA

SEQ ID NO: 2521 - DNA, 561 bp, synthetic construct; identical to SEQ ID NO: 114
  misc_feature 1..561: note = Description of Artificial Sequence: Synthetic destabilizing domain (DD)
  source 1..561: mol_type = other DNA

SEQ ID NO: 2522 - DNA, 561 bp, synthetic construct; identical to SEQ ID NO: 115
  misc_feature 1..561: note = Description of Artificial Sequence: Synthetic destabilizing domain (DD)
  source 1..561: mol_type = other DNA

SEQ ID NO: 2523 - DNA, 561 bp, synthetic construct; identical to SEQ ID NO: 116
  misc_feature 1..561: note = Description of Artificial Sequence: Synthetic destabilizing domain (DD)
  source 1..561: mol_type = other DNA

SEQ ID NO: 2524 - DNA, 561 bp, synthetic construct; identical to SEQ ID NO: 117
  misc_feature 1..561: note = Description of Artificial Sequence: Synthetic destabilizing domain (DD)
  source 1..561: mol_type = other DNA

SEQ ID NO: 2525 - DNA, 561 bp, synthetic construct; identical to SEQ ID NO: 118
  misc_feature 1..561: note = Description of Artificial Sequence: Synthetic destabilizing domain (DD)
  source 1..561: mol_type = other DNA

SEQ ID NO: 2526 - DNA, 561 bp, synthetic construct; identical to SEQ ID NO: 119
  misc_feature 1..561: note = Description of Artificial Sequence: Synthetic destabilizing domain (DD)
  source 1..561: mol_type = other DNA

SEQ ID NO: 2527 - DNA, 561 bp, synthetic construct; identical to SEQ ID NO: 80
  misc_feature 1..561: note = Description of Artificial Sequence: Synthetic destabilizing domain (DD)
  source 1..561: mol_type = other DNA

SEQ ID NO: 2528 - DNA, 561 bp, synthetic construct; identical to SEQ ID NO: 120
  misc_feature 1..561: note = Description of Artificial Sequence: Synthetic destabilizing domain (DD)
  source 1..561: mol_type = other DNA

SEQ ID NO: 2529 - DNA, 561 bp, synthetic construct; identical to SEQ ID NO: 121
  misc_feature 1..561: note = Description of Artificial Sequence: Synthetic destabilizing domain (DD)
  source 1..561: mol_type = other DNA

SEQ ID NO: 2530 - DNA, 561 bp, synthetic construct; identical to SEQ ID NO: 122
  misc_feature 1..561: note = Description of Artificial Sequence: Synthetic destabilizing domain (DD)
  source 1..561: mol_type = other DNA

SEQ ID NO: 2531 - DNA, 561 bp, synthetic construct; identical to SEQ ID NO: 123
  misc_feature 1..561: note = Description of Artificial Sequence: Synthetic destabilizing domain (DD)
  source 1..561: mol_type = other DNA

SEQ ID NO: 2532 - DNA, 561 bp, synthetic construct; identical to SEQ ID NO: 124
  misc_feature 1..561: note = Description of Artificial Sequence: Synthetic destabilizing domain (DD)
  source 1..561: mol_type = other DNA

SEQ ID NO: 2533 - DNA, 558 bp, synthetic construct; identical to SEQ ID NO: 125
  misc_feature 1..558: note = Description of Artificial Sequence: Synthetic destabilizing domain (DD)
  source 1..558: mol_type = other DNA

SEQ ID NO: 2534 - DNA, 561 bp, synthetic construct; identical to SEQ ID NO: 107
  misc_feature 1..561: note = Description of Artificial Sequence: Synthetic destabilizing domain (DD)
  source 1..561: mol_type = other DNA

SEQ ID NO: 2535 - DNA, 561 bp, synthetic construct; identical to SEQ ID NO: 114
  misc_feature 1..561: note = Description of Artificial Sequence: Synthetic destabilizing domain (DD)
  source 1..561: mol_type = other DNA

SEQ ID NO: 2536 - DNA, 561 bp, synthetic construct; identical to SEQ ID NO: 115
  misc_feature 1..561: note = Description of Artificial Sequence: Synthetic destabilizing domain (DD)
  source 1..561: mol_type = other DNA

SEQ ID NO: 2537 - DNA, 561 bp, synthetic construct; identical to SEQ ID NO: 116
  misc_feature 1..561: note = Description of Artificial Sequence: Synthetic destabilizing domain (DD)
  source 1..561: mol_type = other DNA

SEQ ID NO: 2538 - DNA, 561 bp, synthetic construct; identical to SEQ ID NO: 117
  misc_feature 1..561: note = Description of Artificial Sequence: Synthetic destabilizing domain (DD)
  source 1..561: mol_type = other DNA

SEQ ID NO: 2539 - DNA, 561 bp, synthetic construct; identical to SEQ ID NO: 118
  misc_feature 1..561: note = Description of Artificial Sequence: Synthetic destabilizing domain (DD)
  source 1..561: mol_type = other DNA

SEQ ID NO: 2540 - DNA, 321 bp, synthetic construct; identical to SEQ ID NO: 1664
  misc_feature 1..321: note = Description of Artificial Sequence: Synthetic Destabilizing Domain (DD)
  source 1..321: mol_type = other DNA

SEQ ID NO: 2541 - DNA, 321 bp, synthetic construct; identical to SEQ ID NO: 1666
  misc_feature 1..321: note = Description of Artificial Sequence: Synthetic Destabilizing Domain (DD)
  source 1..321: mol_type = other DNA

SEQ ID NO: 2542 - DNA, 321 bp, synthetic construct; identical to SEQ ID NO: 1667
  misc_feature 1..321: note = Description of Artificial Sequence: Synthetic Destabilizing Domain (DD)
  source 1..321: mol_type = other DNA

SEQ ID NO: 2543 - DNA, 561 bp, synthetic construct; identical to SEQ ID NO: 73
  misc_feature 1..561: note = Description of Artificial Sequence: Synthetic Destabilizing Domain (DD)
  source 1..561: mol_type = other DNA

SEQ ID NO: 2544 - DNA, 561 bp, synthetic construct; identical to SEQ ID NO: 82
  misc_feature 1..561: note = Description of Artificial Sequence: Synthetic Destabilizing Domain (DD)
  source 1..561: mol_type = other DNA

SEQ ID NO: 2545 - DNA, 561 bp, synthetic construct; identical to SEQ ID NO: 74
  misc_feature 1..561: note = Description of Artificial Sequence: Synthetic Destabilizing Domain (DD)
  source 1..561: mol_type = other DNA

SEQ ID NO: 2546 - DNA, 561 bp, synthetic construct; identical to SEQ ID NO: 80
  misc_feature 1..561: note = Description of Artificial Sequence: Synthetic Destabilizing Domain (DD)
  source 1..561: mol_type = other DNA

SEQ ID NO: 2547 - DNA, 561 bp, synthetic construct; identical to SEQ ID NO: 78
  misc_feature 1..561: note = Description of Artificial Sequence: Synthetic Destabilizing Domain (DD)
  source 1..561: mol_type = other DNA

SEQ ID NO: 2548 - DNA, 561 bp, synthetic construct; identical to SEQ ID NO: 75
  misc_feature 1..561: note = Description of Artificial Sequence: Synthetic Destabilizing Domain (DD)
  source 1..561: mol_type = other DNA

SEQ ID NO: 2549 - DNA, 561 bp, synthetic construct; identical to SEQ ID NO: 79
  misc_feature 1..561: note = Description of Artificial Sequence: Synthetic Destabilizing Domain (DD)
  source 1..561: mol_type = other DNA

SEQ ID NO: 2550 - DNA, 561 bp, synthetic construct; identical to SEQ ID NO: 81
  misc_feature 1..561: note = Description of Artificial Sequence: Synthetic Destabilizing Domain (DD)
  source 1..561: mol_type = other DNA

SEQ ID NO: 2551 - DNA, 561 bp, synthetic construct; identical to SEQ ID NO: 76
  misc_feature 1..561: note = Description of Artificial Sequence: Synthetic Destabilizing Domain (DD)
  source 1..561: mol_type = other DNA

SEQ ID NO: 2552 - DNA, 561 bp, synthetic construct; identical to SEQ ID NO: 84
  misc_feature 1..561: note = Description of Artificial Sequence: Synthetic Destabilizing Domain (DD)
  source 1..561: mol_type = other DNA

SEQ ID NO: 2553 - DNA, 558 bp, synthetic construct; identical to SEQ ID NO: 86
  misc_feature 1..558: note = Description of Artificial Sequence: Synthetic Destabilizing Domain (DD)
  source 1..558: mol_type = other DNA

SEQ ID NO: 2554 - DNA, 561 bp, synthetic construct; identical to SEQ ID NO: 107
  misc_feature 1..561: note = Description of Artificial Sequence: Synthetic Destabilizing Domain (DD)
  source 1..561: mol_type = other DNA

SEQ ID NO: 2555 - DNA, 321 bp, synthetic construct; identical to SEQ ID NO: 1664
  misc_feature 1..321: note = Description of Artificial Sequence: Synthetic Destabilized Domain (DD)
  source 1..321: mol_type = other DNA

SEQ ID NO: 2556 - DNA, 321 bp, synthetic construct; identical to SEQ ID NO: 1665
  misc_feature 1..321: note = Description of Artificial Sequence: Synthetic Destabilized Domain (DD)
  source 1..321: mol_type = other DNA

SEQ ID NO: 2557 - DNA, 321 bp, synthetic construct; identical to SEQ ID NO: 1666
  misc_feature 1..321: note = Description of Artificial Sequence: Synthetic Destabilized Domain (DD)
  source 1..321: mol_type = other DNA

SEQ ID NO: 2558 - DNA, 324 bp, synthetic construct; identical to SEQ ID NO: 1669
  misc_feature 1..324: note = Description of Artificial Sequence: Synthetic Destabilized Domain (DD)
  source 1..324: mol_type = other DNA

SEQ ID NO: 2559 - DNA, 324 bp, synthetic construct; identical to SEQ ID NO: 1670
  misc_feature 1..324: note = Description of Artificial Sequence: Synthetic Destabilized Domain (DD)
  source 1..324: mol_type = other DNA

SEQ ID NO: 2560 - DNA, 324 bp, synthetic construct; identical to SEQ ID NO: 1671
  misc_feature 1..324: note = Description of Artificial Sequence: Synthetic Destabilized Domain (DD)
  source 1..324: mol_type = other DNA

SEQ ID NO: 2561 - DNA, 558 bp, synthetic construct; identical to SEQ ID NO: 86
  misc_feature 1..558: note = Description of Artificial Sequence: Synthetic Destabilized Domain (DD)
  source 1..558: mol_type = other DNA

SEQ ID NO: 2562 - DNA, 561 bp, synthetic construct; identical to SEQ ID NO: 73
  misc_feature 1..561: note = Description of Artificial Sequence: Synthetic Destabilizing Domain (DD)
  source 1..561: mol_type = other DNA

SEQ ID NO: 2563 - DNA, 561 bp, synthetic construct; identical to SEQ ID NO: 82
  misc_feature 1..561: note = Description of Artificial Sequence: Synthetic Destabilizing Domain (DD)
  source 1..561: mol_type = other DNA

SEQ ID NO: 2564 - DNA, 561 bp, synthetic construct; identical to SEQ ID NO: 74
  misc_feature 1..561: note = Description of Artificial Sequence: Synthetic Destabilizing Domain (DD)
  source 1..561: mol_type = other DNA

SEQ ID NO: 2565 - DNA, 561 bp, synthetic construct; identical to SEQ ID NO: 80
  misc_feature 1..561: note = Description of Artificial Sequence: Synthetic Destabilizing Domain (DD)
  source 1..561: mol_type = other DNA

SEQ ID NO: 2566 - DNA, 561 bp, synthetic construct; identical to SEQ ID NO: 78
  misc_feature 1..561: note = Description of Artificial Sequence: Synthetic Destabilizing Domain (DD)
  source 1..561: mol_type = other DNA

SEQ ID NO: 2567 - DNA, 561 bp, synthetic construct; identical to SEQ ID NO: 75
  misc_feature 1..561: note = Description of Artificial Sequence: Synthetic Destabilizing Domain (DD)
  source 1..561: mol_type = other DNA

SEQ ID NO: 2568 - DNA, 561 bp, synthetic construct; identical to SEQ ID NO: 79
  misc_feature 1..561: note = Description of Artificial Sequence: Synthetic Destabilizing Domain (DD)
  source 1..561: mol_type = other DNA

SEQ ID NO: 2569 - DNA, 561 bp, synthetic construct; identical to SEQ ID NO: 81
  misc_feature 1..561: note = Description of Artificial Sequence: Synthetic Destabilizing Domain (DD)
  source 1..561: mol_type = other DNA

SEQ ID NO: 2570 - DNA, 561 bp, synthetic construct; identical to SEQ ID NO: 76
  misc_feature 1..561: note = Description of Artificial Sequence: Synthetic Destabilizing Domain (DD)
  source 1..561: mol_type = other DNA

SEQ ID NO: 2571 - DNA, 561 bp, synthetic construct; identical to SEQ ID NO: 84
  misc_feature 1..561: note = Description of Artificial Sequence: Synthetic Destabilizing Domain (DD)
  source 1..561: mol_type = other DNA

SEQ ID NO: 2572 - DNA, 561 bp, synthetic construct; identical to SEQ ID NO: 91
  misc_feature 1..561: note = Description of Artificial Sequence: Synthetic Destabilizing Domain (DD)
  source 1..561: mol_type = other DNA

SEQ ID NO: 2573 - DNA, 561 bp, synthetic construct; identical to SEQ ID NO: 92
  misc_feature 1..561: note = Description of Artificial Sequence: Synthetic Destabilizing Domain (DD)
  source 1..561: mol_type = other DNA

SEQ ID NO: 2574 - DNA, 561 bp, synthetic construct; identical to SEQ ID NO: 93
  misc_feature 1..561: note = Description of Artificial Sequence: Synthetic Destabilizing Domain (DD)
  source 1..561: mol_type = other DNA

SEQ ID NO: 2575 - DNA, 561 bp, synthetic construct; identical to SEQ ID NO: 94
  misc_feature 1..561: note = Description of Artificial Sequence: Synthetic Destabilizing Domain (DD)
  source 1..561: mol_type = other DNA

SEQ ID NO: 2576 - DNA, 561 bp, synthetic construct; identical to SEQ ID NO: 95
  misc_feature 1..561: note = Description of Artificial Sequence: Synthetic Destabilizing Domain (DD)
  source 1..561: mol_type = other DNA

SEQ ID NO: 2577 - DNA, 561 bp, synthetic construct; identical to SEQ ID NO: 96
  misc_feature 1..561: note = Description of Artificial Sequence: Synthetic Destabilizing Domain (DD)
  source 1..561: mol_type = other DNA

SEQ ID NO: 2578 - DNA, 561 bp, synthetic construct; identical to SEQ ID NO: 97
  misc_feature 1..561: note = Description of Artificial Sequence: Synthetic Destabilizing Domain (DD)
  source 1..561: mol_type = other DNA

SEQ ID NO: 2579 - DNA, 561 bp, synthetic construct; identical to SEQ ID NO: 98
  misc_feature 1..561: note = Description of Artificial Sequence: Synthetic Destabilizing Domain (DD)
  source 1..561: mol_type = other DNA

SEQ ID NO: 2580 - DNA, 561 bp, synthetic construct; identical to SEQ ID NO: 99
  misc_feature 1..561: note = Description of Artificial Sequence: Synthetic Destabilizing Domain (DD)
  source 1..561: mol_type = other DNA

SEQ ID NO: 2581 - DNA, 561 bp, synthetic construct; identical to SEQ ID NO: 100
  misc_feature 1..561: note = Description of Artificial Sequence: Synthetic Destabilizing Domain (DD)
  source 1..561: mol_type = other DNA

SEQ ID NO: 2582 - DNA, 561 bp, synthetic construct; identical to SEQ ID NO: 101
  misc_feature 1..561: note = Description of Artificial Sequence: Synthetic Destabilizing Domain (DD)
  source 1..561: mol_type = other DNA

SEQ ID NO: 2583 - DNA, 561 bp, synthetic construct; identical to SEQ ID NO: 102
  misc_feature 1..561: note = Description of Artificial Sequence: Synthetic Destabilizing Domain (DD)
  source 1..561: mol_type = other DNA

SEQ ID NO: 2584 - DNA, 561 bp, synthetic construct; identical to SEQ ID NO: 103
  misc_feature 1..561: note = Description of Artificial Sequence: Synthetic Destabilizing Domain (DD)
  source 1..561: mol_type = other DNA

SEQ ID NO: 2585 - DNA, 561 bp, synthetic construct; identical to SEQ ID NO: 104
  misc_feature 1..561: note = Description of Artificial Sequence: Synthetic Destabilizing Domain (DD)
  source 1..561: mol_type = other DNA

SEQ ID NO: 2586 - DNA, 561 bp, synthetic construct; identical to SEQ ID NO: 105
  misc_feature 1..561: note = Description of Artificial Sequence: Synthetic Destabilizing Domain (DD)
  source 1..561: mol_type = other DNA

SEQ ID NO: 2587 - DNA, 561 bp, synthetic construct; identical to SEQ ID NO: 106
  misc_feature 1..561: note = Description of Artificial Sequence: Synthetic Destabilizing Domain (DD)
  source 1..561: mol_type = other DNA

SEQ ID NO: 2588 - DNA, 561 bp, synthetic construct; identical to SEQ ID NO: 107
  misc_feature 1..561: note = Description of Artificial Sequence: Synthetic Destabilizing Domain (DD)
  source 1..561: mol_type = other DNA

SEQ ID NO: 2589 - DNA, 561 bp, synthetic construct; identical to SEQ ID NO: 108
  misc_feature 1..561: note = Description of Artificial Sequence: Synthetic Destabilizing Domain (DD)
  source 1..561: mol_type = other DNA

SEQ ID NO: 2590 - DNA, 561 bp, synthetic construct; identical to SEQ ID NO: 109
  misc_feature 1..561: note = Description of Artificial Sequence: Synthetic Destabilizing Domain (DD)
  source 1..561: mol_type = other DNA

SEQ ID NO: 2591 - DNA, 561 bp, synthetic construct; identical to SEQ ID NO: 110
  misc_feature 1..561: note = Description of Artificial Sequence: Synthetic Destabilizing Domain (DD)
  source 1..561: mol_type = other DNA

SEQ ID NO: 2592 - DNA, 561 bp, synthetic construct; identical to SEQ ID NO: 111
  misc_feature 1..561: note = Description of Artificial Sequence: Synthetic Destabilizing Domain (DD)
  source 1..561: mol_type = other DNA

SEQ ID NO: 2593 - DNA, 561 bp, synthetic construct; identical to SEQ ID NO: 112
  misc_feature 1..561: note = Description of Artificial Sequence: Synthetic Destabilizing Domain (DD)
  source 1..561: mol_type = other DNA

SEQ ID NO: 2594 - DNA, 561 bp, synthetic construct; identical to SEQ ID NO: 113
  misc_feature 1..561: note = Description of Artificial Sequence: Synthetic Destabilizing Domain (DD)
  source 1..561: mol_type = other DNA

SEQ ID NO: 2595 - DNA, 561 bp, synthetic construct; identical to SEQ ID NO: 114
  misc_feature 1..561: note = Description of Artificial Sequence: Synthetic Destabilizing Domain (DD)
  source 1..561: mol_type = other DNA

SEQ ID NO: 2596 - DNA, 561 bp, synthetic construct; identical to SEQ ID NO: 115
  misc_feature 1..561: note = Description of Artificial Sequence: Synthetic Destabilizing Domain (DD)
  source 1..561: mol_type = other DNA

SEQ ID NO: 2597 - DNA, 561 bp, synthetic construct; identical to SEQ ID NO: 116
  misc_feature 1..561: note = Description of Artificial Sequence: Synthetic Destabilizing Domain (DD)
  source 1..561: mol_type = other DNA

SEQ ID NO: 2598 - DNA, 561 bp, synthetic construct; identical to SEQ ID NO: 117
  misc_feature 1..561: note = Description of Artificial Sequence: Synthetic Destabilizing Domain (DD)
  source 1..561: mol_type = other DNA

SEQ ID NO: 2599 - DNA, 561 bp, synthetic construct; identical to SEQ ID NO: 118
  misc_feature 1..561: note = Description of Artificial Sequence: Synthetic Destabilizing Domain (DD)
  source 1..561: mol_type = other DNA

SEQ ID NO: 2600 - DNA, 561 bp, synthetic construct; identical to SEQ ID NO: 119
  misc_feature 1..561: note = Description of Artificial Sequence: Synthetic Destabilizing Domain (DD)
  source 1..561: mol_type = other DNA

SEQ ID NO: 2601 - DNA, 561 bp, synthetic construct; identical to SEQ ID NO: 120
  misc_feature 1..561: note = Description of Artificial Sequence: Synthetic Destabilizing Domain (DD)
  source 1..561: mol_type = other DNA

SEQ ID NO: 2602 - DNA, 561 bp, synthetic construct; identical to SEQ ID NO: 121
  misc_feature 1..561: note = Description of Artificial Sequence: Synthetic Destabilizing Domain (DD)
  source 1..561: mol_type = other DNA

SEQ ID NO: 2603 - DNA, 561 bp, synthetic construct; identical to SEQ ID NO: 122
  misc_feature 1..561: note = Description of Artificial Sequence: Synthetic Destabilizing Domain (DD)
  source 1..561: mol_type = other DNA

SEQ ID NO: 2604 - DNA, 561 bp, synthetic construct; identical to SEQ ID NO: 123
  misc_feature 1..561: note = Description of Artificial Sequence: Synthetic Destabilizing Domain (DD)
  source 1..561: mol_type = other DNA

SEQ ID NO: 2605 - DNA, 561 bp, synthetic construct; identical to SEQ ID NO: 124
  misc_feature 1..561: note = Description of Artificial Sequence: Synthetic Destabilizing Domain (DD)
  source 1..561: mol_type = other DNA

SEQ ID NO: 2606 - DNA, 558 bp, synthetic construct; identical to SEQ ID NO: 125
  misc_feature 1..558: note = Description of Artificial Sequence: Synthetic Destabilizing Domain (DD)
  source 1..558: mol_type = other DNA

SEQ ID NO: 2607 - DNA, 558 bp, synthetic construct; identical to SEQ ID NO: 1685
  misc_feature 1..558: note = Description of Artificial Sequence: Synthetic Destabilizing Domain (DD)
  source 1..558: mol_type = other DNA

SEQ ID NO: 2608 - DNA, 1959 bp, synthetic construct; identical to SEQ ID NO: 1822
  misc_feature 1..1959: note = Description of Artificial Sequence: Synthetic Construct
  source 1..1959: mol_type = other DNA

SEQ ID NO: 2609 - DNA, 1962 bp, synthetic construct; identical to SEQ ID NO: 1824
  misc_feature 1..1962: note = Description of Artificial Sequence: Synthetic Construct
  source 1..1962: mol_type = other DNA

SEQ ID NO: 2610 - DNA, 1971 bp, synthetic construct; identical to SEQ ID NO: 1826
  misc_feature 1..1971: note = Description of Artificial Sequence: Synthetic Construct
  source 1..1971: mol_type = other DNA

SEQ ID NO: 2611 - DNA, 1968 bp, synthetic construct; identical to SEQ ID NO: 1828
  misc_feature 1..1968: note = Description of Artificial Sequence: Synthetic Construct
  source 1..1968: mol_type = other DNA

SEQ ID NO: 2612 - DNA, 1956 bp, synthetic construct; identical to SEQ ID NO: 1830
  misc_feature 1..1956: note = Description of Artificial Sequence: Synthetic Construct
  source 1..1956: mol_type = other DNA

SEQ ID NO: 2613 - DNA, 1623 bp, synthetic construct; identical to SEQ ID NO: 172
  misc_feature 1..1623: note = Description of Artificial Sequence: Synthetic Construct
  source 1..1623: mol_type = other DNA

SEQ ID NO: 2614 - DNA, 2130 bp, synthetic construct; identical to SEQ ID NO: 1834
  misc_feature 1..2130: note = Description of Artificial Sequence: Synthetic Construct
  source 1..2130: mol_type = other DNA

SEQ ID NO: 2615 - DNA, 2214 bp, synthetic construct; identical to SEQ ID NO: 173
  misc_feature 1..2214: note = Description of Artificial Sequence: Synthetic Construct
  source 1..2214: mol_type = other DNA

SEQ ID NO: 2616 - DNA, 1980 bp, synthetic construct; identical to SEQ ID NO: 1838
  misc_feature 1..1980: note = Description of Artificial Sequence: Synthetic Construct
  source 1..1980: mol_type = other DNA

SEQ ID NO: 2617 - DNA, 405 bp, synthetic construct; identical to SEQ ID NO: 1857
  misc_feature 1..405: note = Description of Artificial Sequence: Synthetic polynucleotide
  source 1..405: mol_type = other DNA

SEQ ID NO: 2618 - DNA, 912 bp, synthetic construct; identical to SEQ ID NO: 1859
  misc_feature 1..912: note = Description of Artificial Sequence: Synthetic polynucleotide
  source 1..912: mol_type = other DNA

SEQ ID NO: 2619 - DNA, 432 bp, synthetic construct; identical to SEQ ID NO: 1861
  misc_feature 1..432: note = Description of Artificial Sequence: Synthetic polynucleotide
  source 1..432: mol_type = other DNA

SEQ ID NO: 2620 - DNA, 1170 bp, synthetic construct; identical to SEQ ID NO: 1863
  misc_feature 1..1170: note = Description of Artificial Sequence: Synthetic polynucleotide
  source 1..1170: mol_type = other DNA

SEQ ID NO: 2621 - DNA, 1734 bp, synthetic construct; identical to SEQ ID NO: 1865
  misc_feature 1..1734: note = Description of Artificial Sequence: Synthetic polynucleotide
  source 1..1734: mol_type = other DNA

SEQ ID NO: 2622 - DNA, 477 bp, synthetic construct; identical to SEQ ID NO: 1682
  misc_feature 1..477: note = Description of Artificial Sequence: Synthetic Destabilizing Domain (DD)
  source 1..477: mol_type = other DNA

SEQ ID NO: 2623 - DNA, 474 bp, synthetic construct; identical to SEQ ID NO: 1683
  misc_feature 1..474: note = Description of Artificial Sequence: Synthetic Destabilizing Domain (DD)
  source 1..474: mol_type = other DNA

SEQ ID NO: 2624 - DNA, 474 bp, synthetic construct; identical to SEQ ID NO: 1684
  misc_feature 1..474: note = Description of Artificial Sequence: Synthetic Destabilizing Domain (DD)
  source 1..474: mol_type = other DNA

SEQ ID NO: 2625 - DNA, 561 bp, synthetic construct; identical to SEQ ID NO: 82
  misc_feature 1..561: note = Description of Artificial Sequence: Synthetic Destabilizing Domain (DD)
  source 1..561: mol_type = other DNA

SEQ ID NO: 2626 - DNA, 561 bp, synthetic construct; identical to SEQ ID NO: 83
  misc_feature 1..561: note = Description of Artificial Sequence: Synthetic Destabilizing Domain (DD)
  source 1..561: mol_type = other DNA

SEQ ID NO: 2627 - DNA, 561 bp, synthetic construct; identical to SEQ ID NO: 76
  misc_feature 1..561: note = Description of Artificial Sequence: Synthetic Destabilizing Domain (DD)
  source 1..561: mol_type = other DNA

SEQ ID NO: 2628 - DNA, 561 bp, synthetic construct; identical to SEQ ID NO: 77
  misc_feature 1..561: note = Description of Artificial Sequence: Synthetic Destabilizing Domain (DD)
  source 1..561: mol_type = other DNA

SEQ ID NO: 2629 - DNA, 561 bp, synthetic construct; identical to SEQ ID NO: 84
  misc_feature 1..561: note = Description of Artificial Sequence: Synthetic Destabilizing Domain (DD)
  source 1..561: mol_type = other DNA

SEQ ID NO: 2630 - DNA, 561 bp, synthetic construct; identical to SEQ ID NO: 85
  misc_feature 1..561: note = Description of Artificial Sequence: Synthetic Destabilizing Domain (DD)
  source 1..561: mol_type = other DNA

SEQ ID NO: 2631 - DNA, 558 bp, synthetic construct; identical to SEQ ID NO: 86
  misc_feature 1..558: note = Description of Artificial Sequence: Synthetic Destabilizing Domain (DD)
  source 1..558: mol_type = other DNA

SEQ ID NO: 2632 - DNA, 561 bp, synthetic construct; identical to SEQ ID NO: 74
  misc_feature 1..561: note = Description of Artificial Sequence: Synthetic Destabilizing Domain (DD)
  source 1..561: mol_type = other DNA

SEQ ID NO: 2633 - DNA, 561 bp, synthetic construct; identical to SEQ ID NO: 80
  misc_feature 1..561: note = Description of Artificial Sequence: Synthetic Destabilizing Domain (DD)
  source 1..561: mol_type = other DNA

SEQ ID NO: 2634 - DNA, 561 bp, synthetic construct; identical to SEQ ID NO: 78
  misc_feature 1..561: note = Description of Artificial Sequence: Synthetic Destabilizing Domain (DD)
  source 1..561: mol_type = other DNA

SEQ ID NO: 2635 - DNA, 561 bp, synthetic construct; identical to SEQ ID NO: 81
  misc_feature 1..561: note = Description of Artificial Sequence: Synthetic Destabilizing Domain (DD)
  source 1..561: mol_type = other DNA

SEQ ID NO: 2636 - DNA, 561 bp, synthetic construct; identical to SEQ ID NO: 90
  misc_feature 1..561: note = Description of Artificial Sequence: Synthetic Destabilizing Domain (DD)
  source 1..561: mol_type = other DNA

SEQ ID NO: 2637 - DNA, 561 bp, synthetic construct; identical to SEQ ID NO: 91
  misc_feature 1..561: note = Description of Artificial Sequence: Synthetic Destabilizing Domain (DD)
  source 1..561: mol_type = other DNA

SEQ ID NO: 2638 - DNA, 561 bp, synthetic construct; identical to SEQ ID NO: 92
  misc_feature 1..561: note = Description of Artificial Sequence: Synthetic Destabilizing Domain (DD)
  source 1..561: mol_type = other DNA

SEQ ID NO: 2639 - DNA, 561 bp, synthetic construct; identical to SEQ ID NO: 93
  misc_feature 1..561: note = Description of Artificial Sequence: Synthetic Destabilizing Domain (DD)
  source 1..561: mol_type = other DNA

SEQ ID NO: 2640 - DNA, 561 bp, synthetic construct; identical to SEQ ID NO: 94
  misc_feature 1..561: note = Description of Artificial Sequence: Synthetic Destabilizing Domain (DD)
  source 1..561: mol_type = other DNA

SEQ ID NO: 2641 - DNA, 561 bp, synthetic construct; identical to SEQ ID NO: 95
  misc_feature 1..561: note = Description of Artificial Sequence: Synthetic Destabilizing Domain (DD)
  source 1..561: mol_type = other DNA

SEQ ID NO: 2642 - DNA, 561 bp, synthetic construct; identical to SEQ ID NO: 96
  misc_feature 1..561: note = Description of Artificial Sequence: Synthetic Destabilizing Domain (DD)
  source 1..561: mol_type = other DNA

SEQ ID NO: 2643 - DNA, 561 bp, synthetic construct; identical to SEQ ID NO: 97
  misc_feature 1..561: note = Description of Artificial Sequence: Synthetic Destabilizing Domain (DD)
  source 1..561: mol_type = other DNA

SEQ ID NO: 2644 - DNA, 561 bp, synthetic construct; identical to SEQ ID NO: 98
  misc_feature 1..561: note = Description of Artificial Sequence: Synthetic Destabilizing Domain (DD)
  source 1..561: mol_type = other DNA

SEQ ID NO: 2645 - DNA, 561 bp, synthetic construct; identical to SEQ ID NO: 99
  misc_feature 1..561: note = Description of Artificial Sequence: Synthetic Destabilizing Domain (DD)
  source 1..561: mol_type = other DNA

SEQ ID NO: 2646 - DNA, 561 bp, synthetic construct; identical to SEQ ID NO: 100
  misc_feature 1..561: note = Description of Artificial Sequence: Synthetic Destabilizing Domain (DD)
  source 1..561: mol_type = other DNA

SEQ ID NO: 2647 - DNA, 561 bp, synthetic construct; identical to SEQ ID NO: 101
  misc_feature 1..561: note = Description of Artificial Sequence: Synthetic Destabilizing Domain (DD)
  source 1..561: mol_type = other DNA

SEQ ID NO: 2648 - DNA, 561 bp, synthetic construct; identical to SEQ ID NO: 102
  misc_feature 1..561: note = Description of Artificial Sequence: Synthetic Destabilizing Domain (DD)
  source 1..561: mol_type = other DNA

SEQ ID NO: 2649 - DNA, 561 bp, synthetic construct; identical to SEQ ID NO: 103
  misc_feature 1..561: note = Description of Artificial Sequence: Synthetic Destabilizing Domain (DD)
  source 1..561: mol_type = other DNA

SEQ ID NO: 2650 - DNA, 561 bp, synthetic construct; identical to SEQ ID NO: 104
  misc_feature 1..561: note = Description of Artificial Sequence: Synthetic Destabilizing Domain (DD)
  source 1..561: mol_type = other DNA

SEQ ID NO: 2651 - DNA, 561 bp, synthetic construct; identical to SEQ ID NO: 105
  misc_feature 1..561: note = Description of Artificial Sequence: Synthetic Destabilizing Domain (DD)
  source 1..561: mol_type = other DNA

SEQ ID NO: 2652 - DNA, 561 bp, synthetic construct; identical to SEQ ID NO: 106
  misc_feature 1..561: note = Description of Artificial Sequence: Synthetic Destabilizing Domain (DD)
  source 1..561: mol_type = other DNA

SEQ ID NO: 2653 - DNA, 561 bp, synthetic construct; identical to SEQ ID NO: 107
  misc_feature 1..561: note = Description of Artificial Sequence: Synthetic Destabilizing Domain (DD)
  source 1..561: mol_type = other DNA

SEQ ID NO: 2654 - DNA, 561 bp, synthetic construct; identical to SEQ ID NO: 108
  misc_feature 1..561: note = Description of Artificial Sequence: Synthetic Destabilizing Domain (DD)
  source 1..561: mol_type = other DNA

SEQ ID NO: 2655 - DNA, 561 bp, synthetic construct; identical to SEQ ID NO: 109
  misc_feature 1..561: note = Description of Artificial Sequence: Synthetic Destabilizing Domain (DD)
  source 1..561: mol_type = other DNA

SEQ ID NO: 2656 - DNA, 561 bp, synthetic construct; identical to SEQ ID NO: 110
  misc_feature 1..561: note = Description of Artificial Sequence: Synthetic Destabilizing Domain (DD)
  source 1..561: mol_type = other DNA

SEQ ID NO: 2657 - DNA, 561 bp, synthetic construct; identical to SEQ ID NO: 111
  misc_feature 1..561: note = Description of Artificial Sequence: Synthetic Destabilizing Domain (DD)
  source 1..561: mol_type = other DNA

SEQ ID NO: 2658 - DNA, 561 bp, synthetic construct; identical to SEQ ID NO: 112
  misc_feature 1..561: note = Description of Artificial Sequence: Synthetic Destabilizing Domain (DD)
  source 1..561: mol_type = other DNA

SEQ ID NO: 2659 - DNA, 561 bp, synthetic construct; identical to SEQ ID NO: 113
  misc_feature 1..561: note = Description of Artificial Sequence: Synthetic Destabilizing Domain (DD)
  source 1..561: mol_type = other DNA

SEQ ID NO: 2660 - DNA, 561 bp, synthetic construct; identical to SEQ ID NO: 114
  misc_feature 1..561: note = Description of Artificial Sequence: Synthetic Destabilizing Domain (DD)
  source 1..561: mol_type = other DNA

SEQ ID NO: 2661 - DNA, 561 bp, synthetic construct; identical to SEQ ID NO: 115
  misc_feature 1..561: note = Description of Artificial Sequence: Synthetic Destabilizing Domain (DD)
  source 1..561: mol_type = other DNA

SEQ ID NO: 2662 - DNA, 561 bp, synthetic construct; identical to SEQ ID NO: 116
  misc_feature 1..561: note = Description of Artificial Sequence: Synthetic Destabilizing Domain (DD)
  source 1..561: mol_type = other DNA

SEQ ID NO: 2663 - DNA, 561 bp, synthetic construct; identical to SEQ ID NO: 117
  misc_feature 1..561: note = Description of Artificial Sequence: Synthetic Destabilizing Domain (DD)
  source 1..561: mol_type = other DNA

SEQ ID NO: 2664 - DNA, 561 bp, synthetic construct; identical to SEQ ID NO: 118
  misc_feature 1..561: note = Description of Artificial Sequence: Synthetic Destabilizing Domain (DD)
  source 1..561: mol_type = other DNA

SEQ ID NO: 2665 - DNA, 561 bp, synthetic construct; identical to SEQ ID NO: 119
  misc_feature 1..561: note = Description of Artificial Sequence: Synthetic Destabilizing Domain (DD)
  source 1..561: mol_type = other DNA

SEQ ID NO: 2666 - DNA, 561 bp, synthetic construct; identical to SEQ ID NO: 120
  misc_feature 1..561: note = Description of Artificial Sequence: Synthetic Destabilizing Domain (DD)
  source 1..561: mol_type = other DNA

SEQ ID NO: 2667 - DNA, 561 bp, synthetic construct; identical to SEQ ID NO: 121
  misc_feature 1..561: note = Description of Artificial Sequence: Synthetic Destabilizing Domain (DD)
  source 1..561: mol_type = other DNA

SEQ ID NO: 2668 - DNA, 561 bp, synthetic construct; identical to SEQ ID NO: 122
  misc_feature 1..561: note = Description of Artificial Sequence: Synthetic Destabilizing Domain (DD)
  source 1..561: mol_type = other DNA

SEQ ID NO: 2669 - DNA, 561 bp, synthetic construct; identical to SEQ ID NO: 123
  misc_feature 1..561: note = Description of Artificial Sequence: Synthetic Destabilizing Domain (DD)
  source 1..561: mol_type = other DNA

SEQ ID NO: 2670 - DNA, 561 bp, synthetic construct; identical to SEQ ID NO: 124
  misc_feature 1..561: note = Description of Artificial Sequence: Synthetic Destabilizing Domain (DD)
  source 1..561: mol_type = other DNA

SEQ ID NO: 2671 - DNA, 558 bp, synthetic construct; identical to SEQ ID NO: 125
  misc_feature 1..558: note = Description of Artificial Sequence: Synthetic Destabilizing Domain (DD)
  source 1..558: mol_type = other DNA

SEQ ID NO: 2672 - DNA, 558 bp, synthetic construct; identical to SEQ ID NO: 126
  misc_feature 1..558: note = Description of Artificial Sequence: Synthetic Destabilizing Domain (DD)
  source 1..558: mol_type = other DNA

SEQ ID NO: 2673 - DNA, 561 bp, synthetic construct; identical to SEQ ID NO: 1944
  misc_feature 1..561: note = Description of Artificial Sequence: Synthetic Destabilizing Domain (DD)
  source 1..561: mol_type = other DNA

SEQ ID NO: 2674 - DNA, 561 bp, synthetic construct; identical to SEQ ID NO: 1944
  misc_feature 1..561: note = Description of Artificial Sequence: Synthetic Destabilizing Domain (DD)
  source 1..561: mol_type = other DNA

SEQ ID NO: 2675 - DNA, 558 bp, synthetic construct; identical to SEQ ID NO: 1943
  misc_feature 1..558: note = Description of Artificial Sequence: Synthetic Destabilizing Domain (DD)
  source 1..558: mol_type = other DNA

SEQ ID NO: 2676 - DNA, 561 bp, synthetic construct; identical to SEQ ID NO: 1688
  misc_feature 1..561: note = Description of Artificial Sequence: Synthetic Destabilizing Domain (DD)
  source 1..561: mol_type = other DNA

SEQ ID NO: 2677 - DNA, 558 bp, synthetic construct; identical to SEQ ID NO: 1689
  misc_feature 1..558: note = Description of Artificial Sequence: Synthetic Destabilizing Domain (DD)
  source 1..558: mol_type = other DNA

SEQ ID NO: 2678 - DNA, 558 bp, synthetic construct; identical to SEQ ID NO: 1690
  misc_feature 1..558: note = Description of Artificial Sequence: Synthetic Destabilizing Domain (DD)
  source 1..558: mol_type = other DNA

SEQ ID NO: 2679 - DNA, 561 bp, synthetic construct; identical to SEQ ID NO: 1694
  misc_feature 1..561: note = Description of Artificial Sequence: Synthetic Destabilizing Domain (DD)
  source 1..561: mol_type = other DNA

SEQ ID NO: 2680 - DNA, 558 bp, synthetic construct; identical to SEQ ID NO: 1695
  misc_feature 1..558: note = Description of Artificial Sequence: Synthetic Destabilizing Domain (DD)
  source 1..558: mol_type = other DNA

SEQ ID NO: 2681 - DNA, 558 bp, synthetic construct; identical to SEQ ID NO: 1696
  misc_feature 1..558: note = Description of Artificial Sequence: Synthetic Destabilizing Domain (DD)
  source 1..558: mol_type = other DNA

SEQ ID NO: 2682 - DNA, 558 bp, synthetic construct; identical to SEQ ID NO: 1946
  misc_feature 1..558: note = Description of Artificial Sequence: Synthetic Destabilizing Domain (DD)
  source 1..558: mol_type = other DNA

SEQ ID NO: 2683 - DNA, 558 bp, synthetic construct; identical to SEQ ID NO: 1948
  misc_feature 1..558: note = Description of Artificial Sequence: Synthetic Destabilizing Domain (DD)
  source 1..558: mol_type = other DNA

SEQ ID NO: 2684 - DNA, 558 bp, synthetic construct; identical to SEQ ID NO: 1820
  misc_feature 1..558: note = Description of Artificial Sequence: Synthetic Destabilizing Domain (DD)
  source 1..558: mol_type = other DNA

SEQ ID NO: 2685 - DNA, 936 bp, synthetic construct
  misc_feature 1..936: note = Description of Artificial Sequence: Synthetic Construct
  source 1..936: mol_type = other DNA
atgacttccaaggtgtacgaccccgagcaacgcaaacgcatgatcactgggcctcagtggtgggctcgctgcaagcaaatgaacgtgctggactccttcatcaactactatgattccgagaagcacgccgagaacgccgtgatttttctgcatggtaacgctgcctccagctacctgtggaggcacgtcgtgcctcacatcgagcccgtggctagatgcatcatccctgatctgatcggaatgggtaagtccggcaagagcgggaatggctcatatcgcctcctggatcactacaagtacctcaccgcttggttcgagctgctgaaccttccaaagaaaatcatctttgtgggccacgactggggggcttgtctggcctttcactactcctacgagcaccaagacaagatcaaggccatcgtccatgctgagagtgtcgtggacgtgatcgagtcctgggacgagtggcctgacatcgaggaggatatcgccctgatcaagagcgaagagggcgagaaaatggtgcttgagaataacttcttcgtcgagaccatgctcccaagcaagatcatgcggaaactggagcctgaggagttcgctgcctacctggagccattcaaggagaagggcgaggttagacggcctaccctctcctggcctcgcgagatccctctcgttaagggaggcaagcccgacgtcgtccagattgtccgcaactacaacgcctaccttcgggccagcgacgatctgcctaagatgttcatcgagtccgaccctgggttcttttccaacgctattgtcgagggagctaagaagttccctaacaccgagttcgtgaaggtgaagggcctccacttcagccaggaggacgctccagatgaaatgggtaagtacatcaagagcttcgtggagcgcgtgctgaagaacgagcagtaa

SEQ ID NO: 2686 - DNA, 1983 bp, synthetic construct
  misc_feature 1..1983: note = Description of Artificial Sequence: Synthetic Construct
  source 1..1983: mol_type = other DNA
atgggcgtgcaggttgagactataagcccaggcgacggcaggaccttccccaagaggggccagacatgcgtggtgcactacaccggcatgcttgaagacggcaaaaaggtggactcaagcagggacaggaacaagcccttcaagttcatgttgggcaaacaggaggtgatcagaggctgggaggagggtgttgcccagatgagcgtggggcagagggccaagctcacgataagtcccgattacgcctacggcgccaccggtcaccccggcatcatccccccacacgccaccctggtgttcgacgtggaattgctgaagcccgaggagttcatggaagatgccaaaaacattaagaagggcccagcgccattctacccactcgaagacgggaccgccggcgagcagctgcacaaagccatgaagcgctacgccctggtgcccggcaccatcgcctttaccgacgcacatatcgaggtggacattacctacgccgagtacttcgagatgagcgttcggctggcagaagctatgaagcgctatgggctgaatacaaaccatcggatcgtggtgtgcagcgagaatagcttgcagttcttcatgcccgtgttgggtgccctgttcatcggtgtggctgtggccccagctaacgacatctacaacgagcgcgagctgctgaacagcatgggcatcagccagcccaccgtcgtattcgtgagcaagaaagggctgcaaaagatcctcaacgtgcaaaagaagctaccgatcatacaaaagatcatcatcatggatagcaagaccgactaccagggcttccaaagcatgtacaccttcgtgacttcccatttgccacccggcttcaacgagtacgacttcgtgcccgagagcttcgaccgggacaaaaccatcgccctgatcatgaacagtagtggcagtaccggattgcccaagggcgtagccctaccgcaccgcaccgcttgtgtccgattcagtcatgcccgcgaccccatcttcggcaaccagatcatccccgacaccgctatcctcagcgtggtgccatttcaccacggcttcggcatgttcaccacgctgggctacttgatctgcggctttcgggtcgtgctcatgtaccgcttcgaggaggagctattcttgcgcagcttgcaagactataagattcaatctgccctgctggtgcccacactatttagcttcttcgctaagagcactctcatcgacaagtacgacctaagcaacttgcacgagatcgccagcggcggggcgccgctcagcaaggaggtaggtgaggccgtggccaaacgcttccacctaccaggcatccgccagggctacggcctgacagaaacaaccagcgccattctgatcacccccgaaggggacgacaagcctggcgcagtaggcaaggtggtgcccttcttcgaggctaaggtggtggacttggacaccggtaagacactgggtgtgaaccagcgcggcgagctgtgcgtccgtggccccatgatcatgagcggctacgttaacaaccccgaggctacaaacgctctcatcgacaaggacggctggctgcacagcggcgacatcgcctactgggacgaggacgagcacttcttcatcgtggaccggctgaagagcctgatcaaatacaagggctaccaggtagccccagccgaactggagagcatcctgctgcaacaccccaacatcttcgacgccggggtcgccggcctgcccgacgacgatgccggcgagctgcccgccgcagtcgtcgtgctggaacacggtaaaaccatgaccgagaaggagatcgtggactatgtggccagccaggttacaaccgccaagaagctgcgcggtggtgttgtgttcgtggacgaggtgcctaaaggactgaccggcaagttggacgcccgcaagatccgcgagattctcattaaggccaagaagggcggcaagagcaagctgtga

SEQ ID NO: 2687 - DNA, 1263 bp, synthetic construct
  misc_feature 1..1263: note = Description of Artificial Sequence: Synthetic Construct
  source 1..1263: mol_type = other DNA
atgggcgtgcaggttgagactataagcccaggcgacggcaggaccttccccaagaggggccagacatgcgtggtgcactacaccggcatgcttgaagacggcaaaaaggtggactcaagcagggacaggaacaagcccttcaagttcatgttgggcaaacaggaggtgatcagaggctgggaggagggtgttgcccagatgagcgtggggcagagggccaagctcacgataagtcccgattacgcctacggcgccaccggtcaccccggcatcatccccccacacgccaccctggtgttcgacgtggaattgctgaagcccgagagcggcacttccaaggtgtacgaccccgagcaacgcaaacgcatgatcactgggcctcagtggtgggctcgctgcaagcaaatgaacgtgctggactccttcatcaactactatgattccgagaagcacgccgagaacgccgtgatttttctgcatggtaacgctgcctccagctacctgtggaggcacgtcgtgcctcacatcgagcccgtggctagatgcatcatccctgatctgatcggaatgggtaagtccggcaagagcgggaatggctcatatcgcctcctggatcactacaagtacctcaccgcttggttcgagctgctgaaccttccaaagaaaatcatctttgtgggccacgactggggggcttgtctggcctttcactactcctacgagcaccaagacaagatcaaggccatcgtccatgctgagagtgtcgtggacgtgatcgagtcctgggacgagtggcctgacatcgaggaggatatcgccctgatcaagagcgaagagggcgagaaaatggtgcttgagaataacttcttcgtcgagaccatgctcccaagcaagatcatgcggaaactggagcctgaggagttcgctgcctacctggagccattcaaggagaagggcgaggttagacggcctaccctctcctggcctcgcgagatccctctcgttaagggaggcaagcccgacgtcgtccagattgtccgcaactacaacgcctaccttcgggccagcgacgatctgcctaagatgttcatcgagtccgaccctgggttcttttccaacgctattgtcgagggagctaagaagttccctaacaccgagttcgtgaaggtgaagggcctccacttcagccaggaggacgctccagatgaaatgggtaagtacatcaagagcttcgtggagcgcgtgctgaagaacgagcagtaa

SEQ ID NO: 2688 - DNA, 1416 bp, synthetic construct
  misc_feature 1..1416: note = Description of Artificial Sequence: Synthetic Construct
  source 1..1416: mol_type = other DNA
atgatctctctgattgcggcgctggcagttgactacgttattggcatggaaaacgcgatgccatggaacctcccggctgacctggcgtggttcaaacgtaacaccctgaacaaacctgtgatcatgggtcgtcacacctgggaatctattggccgtcctctcccgggtcgtaaaaacatcattctgtcttctcagccaggcaccgacgaccgtgttacctgggttaaaagcgttgacgaagcgattgctgcgtgcggtgatgttcctgaaattatggtgatcggcggtggccgtgttatcgaacagttcctgccgaaagcgcagaaactgtacctgacccacatcgacgcggaagttgaaggtgacacccacttcccggactacgaaccggatgattgggagagcgtattctccgaattccatgatgcggatgcgcaaaactctcattcttactgttttgaaatcctggaacgtcgtagcggcacttccaaggtgtacgaccccgagcaacgcaaacgcatgatcactgggcctcagtggtgggctcgctgcaagcaaatgaacgtgctggactccttcatcaactactatgattccgagaagcacgccgagaacgccgtgatttttctgcatggtaacgctgcctccagctacctgtggaggcacgtcgtgcctcacatcgagcccgtggctagatgcatcatccctgatctgatcggaatgggtaagtccggcaagagcgggaatggctcatatcgcctcctggatcactacaagtacctcaccgcttggttcgagctgctgaaccttccaaagaaaatcatctttgtgggccacgactggggggcttgtctggcctttcactactcctacgagcaccaagacaagatcaaggccatcgtccatgctgagagtgtcgtggacgtgatcgagtcctgggacgagtggcctgacatcgaggaggatatcgccctgatcaagagcgaagagggcgagaaaatggtgcttgagaataacttcttcgtcgagaccatgctcccaagcaagatcatgcggaaactggagcctgaggagttcgctgcctacctggagccattcaaggagaagggcgaggttagacggcctaccctctcctggcctcgcgagatccctctcgttaagggaggcaagcccgacgtcgtccagattgtccgcaactacaacgcctaccttcgggccagcgacgatctgcctaagatgttcatcgagtccgaccctgggttcttttccaacgctattgtcgagggagctaagaagttccctaacaccgagttcgtgaaggtgaagggcctccacttcagccaggaggacgctccagatgaaatgggtaagtacatcaagagcttcgtggagcgcgtgctgaagaacgagcagtaa

SEQ ID NO: 2689 - DNA, 1263 bp, synthetic construct
  misc_feature 1..1263: note = Description of Artificial Sequence: Synthetic Construct
  source 1..1263: mol_type = other DNA
atgacttccaaggtgtacgaccccgagcaacgcaaacgcatgatcactgggcctcagtggtgggctcgctgcaagcaaatgaacgtgctggactccttcatcaactactatgattccgagaagcacgccgagaacgccgtgatttttctgcatggtaacgctgcctccagctacctgtggaggcacgtcgtgcctcacatcgagcccgtggctagatgcatcatccctgatctgatcggaatgggtaagtccggcaagagcgggaatggctcatatcgcctcctggatcactacaagtacctcaccgcttggttcgagctgctgaaccttccaaagaaaatcatctttgtgggccacgactggggggcttgtctggcctttcactactcctacgagcaccaagacaagatcaaggccatcgtccatgctgagagtgtcgtggacgtgatcgagtcctgggacgagtggcctgacatcgaggaggatatcgccctgatcaagagcgaagagggcgagaaaatggtgcttgagaataacttcttcgtcgagaccatgctcccaagcaagatcatgcggaaactggagcctgaggagttcgctgcctacctggagccattcaaggagaagggcgaggttagacggcctaccctctcctggcctcgcgagatccctctcgttaagggaggcaagcccgacgtcgtccagattgtccgcaactacaacgcctaccttcgggccagcgacgatctgcctaagatgttcatcgagtccgaccctgggttcttttccaacgctattgtcgagggagctaagaagttccctaacaccgagttcgtgaaggtgaagggcctccacttcagccaggaggacgctccagatgaaatgggtaagtacatcaagagcttcgtggagcgcgtgctgaagaacgagcagagcggcggcgtgcaggttgagactataagcccaggcgacggcaggaccttccccaagaggggccagacatgcgtggtgcactacaccggcatgcttggcgacggcaaaaaggtggactcaagcagggacaggaacaagcccttcaagttcatgttgggcaaacaggaggtgatcagaggctgggaggagggtgttgcccagatgagcgtggggcagggcgccaagctcacgataagtcccgattacgcctacggcgccaccggtcaccccggcatcatccccccacacgccaccctggtgttcgacgtggaattgctggagctggagtga

SEQ ID NO: 2690 - protein, 557 aa, Homo sapiens
MPPPRLLFFLLFLTPMEVRPEEPLVVKVEEGDNAVLQCLKGTSDGPTQQLTWSRESPLKPFLKLSLGLPGLGIHMRPLAIWLFIFNVSQQMGGFYLCQPGPPSEKAWQPGWTVNVEGSGELFRWNVSDLGGLGCGLKNRSSEGPSSPSGKLMSPKLYVWAKDRPEIWEGEPPCLPPRDSLNQSLSQDLTMAPGSTLWLSCGVPPDSVSRGPLSWTHVHPKGPKSLLSLELKDDRPARDMWVMETGLLLPRATAQDAGKYYCHRGNLTMSFHLEITARPVLWHWLLRTGGWKVSAVTLAYLIFCLCSLVGILHLQRALVLRRKRKRMTDPTRRFFKVTPPPGSGPQNQYGNVLSLPTPTSGLGRAQRWAAGLGGTAPSYGNPSSDVQADGALGSRSPPGVGPEEEEGEGYEEPDSEEDSEFYENDSNLGQDQLSQDGSGYENPEDEPLGPEDEDSFSNAESYENEDEELTQPVARTMDFLSPHGSAWDPSREATSLAGSQSYEDMRGILYAAPQLRSIRGQPGPNHEEDADSYENMDNPDGPDPAWGGGGRMGTWSTR

SEQ ID NO: 2691 - protein, 556 aa, Homo sapiens [sequence omitted]

SEQ ID NO: 2692 - protein, 557 aa, Macaca mulatta
MPPPCLLFFLLFLTPMEVRPQEPLVVKVEEGDNAVLQCLEGTSDGPTQQLVWCRDSPFEPFLNLSLGLPGMGIRMGPLGIWLLIFNVSNQTGGFYLCQPGLPSEKAWQPGWTVSVEGSGELFRWNVSDLGGLGCGLKNRSSEGPSSPSGKLNSSQLYVWAKDRPEMWEGEPVCGPPRDSLNQSLSQDLTMAPGSTLWLSCGVPPDSVSRGPLSWTHVRPKGPKSSLLSLELKDDRPDRDMWVVDTGLLLTRATAQDAGKYYCHRGNWTKSFYLEITARPALWHWLLRIGGWKVPAVTLTYLIFCLCSLVGILQLQRALVLRRKRKRMTDPTRRFFKVTPPPGSGPQNQYGNVLSLPTPTSGLGRAQRWAAGLGGTAPSYGNPSSDVQVDGAVGSRSPPGAGPEEEEGEGYEEPDSEEGSEFYENDSNFGQDQLSQDGSGYENPEDEPLGPEDEDSFSNAESYENEDEELTQPVARTMDFLSPHGSAWDPSREATSLGSQSYEDMRGLLYAAPQLRTIRGQPGPNHEEDADSYENMDNPDGPDPAWGGGGRMGTWSAR

SEQ ID NO: 2693 - protein, 557 aa, synthetic construct
  REGION 1..557: note = Description of Artificial Sequence: Synthetic CD19 mutant
MPPPRLLFFLLFLTPMEVRPEEPLVVKVEEGDNAVLQCLKGTSDGPTQQLTWSRESPLKPFLKLSLGLPGLGIHMRPLAIWLFIFNVSQQMGGFYLCQPGPPSEKAWQPGWTVNVEGSGELFRWNVSDLGGLGCGLKNRSSEGPSSPSGKLMSPKLYVWAKDRPEIWEGEPPCLPPRDSLNQSLSQDLTMAPGSTLWLSCGVPPDSVSRGPLSWTHVRPKGPKSLLSLELKDDRPDRDMWVVDTGLLLTRATAQDAGKYYCHRGNLTMSFHLEITARPVLWHWLLRTGGWKVSAVTLAYLIFCLCSLVGILHLQRALVLRRKRKRMTDPTRRFFKVTPPPGSGPQNQYGNVLSLPTPTSGLGRAQRWAAGLGGTAPSYGNPSSDVQADGALGSRSPPGVGPEEEEGEGYEEPDSEEDSEFYENDSNLGQDQLSQDGSGYENPEDEPLGPEDEDSFSNAESYENEDEELTQPVARTMDFLSPHGSAWDPSREATSLAGSQSYEDMRGILYAAPQLRSIRGQPGPNHEEDADSYENMDNPDGPDPAWGGGGRMGTWSTR

SEQ ID NO: 2694 - protein, 557 aa, synthetic construct
  REGION 1..557: note = Description of Artificial Sequence: Synthetic CD19 mutant
MPPPRLLFFLLFLTPMEVRPEEPLVVKVEEGDNAVLQCLKGTSDGPTQQLTWSRESPLKPFLKLSLGLPGLGIHMRPLAIWLFIFNVSQQMGGFYLCQPGPPSEKAWQPGWTVNVEGSGELFRWNVSDLGGLGCGLKNRSSEGPSSPSGKLMSPKLYVWAKDRPEIWEGEPPCLPPRDSLNQSLSQDLTMAPGSTLWLSCGVPPDSVSRGPLSWTHVRPKGPKSLLSLELKDDRPDRDMWVMETGLLLPRATAQDAGKYYCHRGNLTMSFHLEITARPVLWHWLLRTGGWKVSAVTLAYLIFCLCSLVGILHLQRALVLRRKRKRMTDPTRRFFKVTPPPGSGPQNQYGNVLSLPTPTSGLGRAQRWAAGLGGTAPSYGNPSSDVQADGALGSRSPPGVGPEEEEGEGYEEPDSEEDSEFYENDSNLGQDQLSQDGSGYENPEDEPLGPEDEDSFSNAESYENEDEELTQPVARTMDFLSPHGSAWDPSREATSLAGSQSYEDMRGILYAAPQLRSIRGQPGPNHEEDADSYENMDNPDGPDPAWGGGGRMGTWSTR

SEQ ID NO: 2695 - protein, 467 aa, synthetic construct
  REGION 1..467: note = Description of Artificial Sequence: Synthetic CD19 mutant
MPPPRLLFFLLFLTPMEVRPEEPLVVKVEGELFRWNVSDLGGLGCGLKNRSSEGPSSPSGKLMSPKLYVWAKDRPEIWEGEPPCLPPRDSLNQSLSQDLTMAPGSTLWLSCGVPPDSVSRGPLSWTHVHPKGPKSLLSLELKDDRPARDMWVMETGLLLPRATAQDAGKYYCHRGNLTMSFHLEITARPVLWHWLLRTGGWKVSAVTLAYLIFCLCSLVGILHLQRALVLRRKRKRMTDPTRRFFKVTPPPGSGPQNQYGNVLSLPTPTSGLGRAQRWAAGLGGTAPSYGNPSSDVQADGALGSRSPPGVGPEEEEGEGYEEPDSEEDSEFYENDSNLGQDQLSQDGSGYENPEDEPLGPEDEDSFSNAESYENEDEELTQPVARTMDFLSPHGSAWDPSREATSLGSQSYEDMRGILYAAPQLRSIRGQPGPNHEEDADSYENMDNPDGPDPAWGGGGRMGTWSTR

SEQ ID NO: 2696 - protein, 278 aa, synthetic construct
  REGION 1..278: note = Description of Artificial Sequence: Synthetic CD19 mutant
MPPPRLLFFLLFLTPMEVRPEEPLVVKVEEGDNAVLQCLKGTSDGPTQQLTWSRESPLKPFLKLSLGLPGLGIHMRPLAIWLFIFNVSQQMGGFYLCQPGPPSEKAWQPGWTVNVEGSGELFRWNVSDLGGLGCGLKNRSSEGPSSPSGKLMSPKLYVWAKDRPEIWEGEPPCLPPRDSLNQSLSQDLTMAPGSTLWLSCGVPPDSVSRGPLSWTHVHPKGPKSLLSLELKDDRPARDMWVMETGLLLPRATAQDAGKYYCHRGNLTMSFHLEITARP

SEQ ID NO: 2697 - protein, 189 aa, synthetic construct
  REGION 1..189: note = Description of Artificial Sequence: Synthetic CD19 mutant
MPPPRLLFFLLFLTPMEVRPEEPLVVKVEGELFRWNVSDLGGLGCGLKNRSSEGPSSPSGKLMSPKLYVWAKDRPEIWEGEPPCLPPRDSLNQSLSQDLTMAPGSTLWLSCGVPPDSVSRGPLSWTHVHPKGPKSLLSLELKDDRPARDMWVMETGLLLPRATAQDAGKYYCHRGNLTMSFHLEITARP

SEQ ID NO: 2698 - protein, 311 aa, Renilla reniformis
MTSKVYDPEQRKRMITGPQWWARCKQMNVLDSFINYYDSEKHAENAVIFLHGNAASSYLWRHVVPHIEPVARCIIPDLIGMGKSGKSGNGSYRLLDHYKYLTAWFELLNLPKKIIFVGHDWGACLAFHYSYEHQDKIKAIVHAESVVDVIESWDEWPDIEEDIALIKSEEGEKMVLENNFFVETMLPSKIMRKLEPEEFAAYLEPFKEKGEVRRPTLSWPREIPLVKGGKPDVVQIVRNYNAYLRASDDLPKMFIESDPGFFSNAIVEGAKKFPNTEFVKVKGLHFSQEDAPDEMGKYIKSFVERVLKNEQ

SEQ ID NO: 2699 - DNA, 936 bp, Renilla reniformis; identical to SEQ ID NO: 2685
  source 1..936: mol_type = other DNA

SEQ ID NO: 2700 - protein, 550 aa, Photinus pyralis
MEDAKNIKKGPAPFYPLEDGTAGEQLHKAMKRYALVPGTIAFTDAHIEVDITYAEYFEMSVRLAEAMKRYGLNTNHRIVVCSENSLQFFMPVLGALFIGVAVAPANDIYNERELLNSMGISQPTVVFVSKKGLQKILNVQKKLPIIQKIIIMDSKTDYQGFQSMYTFVTSHLPPGFNEYDFVPESFDRDKTIALIMNSSGSTGLPKGVALPHRTACVRFSHARDPIFGNQIIPDTAILSVVPFHHGFGMFTTLGYLICGFRVVLMYRFEEELFLRSLQDYKIQSALLVPTLFSFFAKSTLIDKYDLSNLHEIASGGAPLSKEVGEAVAKRFHLPGIRQGYGLTETTSAILITPEGDDKPGAVGKVVPFFEAKVVDLDTGKTLGVNQRGELCVRGPMIMSGYVNNPEATNALIDKDGWLHSGDIAYWDEDEHFFIVDRLKSLIKYKGYQVAPAELESILLQHPNIFDAGVAGLPDDDAGELPAAVVVLEHGKTMTEKEIVDYVASQVTTAKKLRGGVVFVDEVPKGLTGKLDARKIREILIKAKKGGKSKL

SEQ ID NO: 2701 - DNA, 1653 bp, Photinus pyralis
  source 1..1653: mol_type = other DNA
atggaagatgccaaaaacattaagaagggcccagcgccattctacccactcgaagacgggaccgccggcgagcagctgcacaaagccatgaagcgctacgccctggtgcccggcaccatcgcctttaccgacgcacatatcgaggtggacattacctacgccgagtacttcgagatgagcgttcggctggcagaagctatgaagcgctatgggctgaatacaaaccatcggatcgtggtgtgcagcgagaatagcttgcagttcttcatgcccgtgttgggtgccctgttcatcggtgtggctgtggccccagctaacgacatctacaacgagcgcgagctgctgaacagcatgggcatcagccagcccaccgtcgtattcgtgagcaagaaagggctgcaaaagatcctcaacgtgcaaaagaagctaccgatcatacaaaagatcatcatcatggatagcaagaccgactaccagggcttccaaagcatgtacaccttcgtgacttcccatttgccacccggcttcaacgagtacgacttcgtgcccgagagcttcgaccgggacaaaaccatcgccctgatcatgaacagtagtggcagtaccggattgcccaagggcgtagccctaccgcaccgcaccgcttgtgtccgattcagtcatgcccgcgaccccatcttcggcaaccagatcatccccgacaccgctatcctcagcgtggtgccatttcaccacggcttcggcatgttcaccacgctgggctacttgatctgcggctttcgggtcgtgctcatgtaccgcttcgaggaggagctattcttgcgcagcttgcaagactataagattcaatctgccctgctggtgcccacactatttagcttcttcgctaagagcactctcatcgacaagtacgacctaagcaacttgcacgagatcgccagcggcggggcgccgctcagcaaggaggtaggtgaggccgtggccaaacgcttccacctaccaggcatccgccagggctacggcctgacagaaacaaccagcgccattctgatcacccccgaaggggacgacaagcctggcgcagtaggcaaggtggtgcccttcttcgaggctaaggtggtggacttggacaccggtaagacactgggtgtgaaccagcgcggcgagctgtgcgtccgtggccccatgatcatgagcggctacgttaacaaccccgaggctacaaacgctctcatcgacaaggacggctggctgcacagcggcgacatcgcctactgggacgaggacgagcacttcttcatcgtggaccggctgaagagcctgatcaaatacaagggctaccaggtagccccagccgaactggagagcatcctgctgcaacaccccaacatcttcgacgccggggtcgccggcctgcccgacgacgatgccggcgagctgcccgccgcagtcgtcgtgctggaacacggtaaaaccatgaccgagaaggagatcgtggactatgtggccagccaggttacaaccgccaagaagctgcgcggtggtgttgtgttcgtggacgaggtgcctaaaggactgaccggcaagttggacgcccgcaagatccgcgagattctcattaaggccaagaagggcggcaagagcaagctgtga

SEQ ID NO: 2702-2703 - skipped (2 entries)

SEQ ID NO: 2704 - protein, 311 aa, Renilla reniformis; identical to SEQ ID NO: 2698

SEQ ID NO: 2705 - DNA, 936 bp, Renilla reniformis; identical to SEQ ID NO: 2685
  source 1..936: mol_type = other DNA

SEQ ID NO: 2706 - protein, 550 aa, Photinus pyralis; identical to SEQ ID NO: 2700

SEQ ID NO: 2707 - DNA, 1653 bp, Photinus pyralis; identical to SEQ ID NO: 2701
  source 1..1653: mol_type = other DNA

SEQ ID NO: 2708 - protein, 311 aa, synthetic construct; identical to SEQ ID NO: 2698
  REGION 1..311: note = Description of Artificial Sequence: Synthetic Construct

SEQ ID NO: 2709 - protein, 660 aa, synthetic construct
  REGION 1..660: note = Description of Artificial Sequence: Synthetic Construct
MGVQVETISPGDGRTFPKRGQTCVVHYTGMLEDGKKVDSSRDRNKPFKFMLGKQEVIRGWEEGVAQMSVGQRAKLTISPDYAYGATGHPGIIPPHATLVFDVELLKPEEFMEDAKNIKKGPAPFYPLEDGTAGEQLHKAMKRYALVPGTIAFTDAHIEVDITYAEYFEMSVRLAEAMKRYGLNTNHRIVVCSENSLQFFMPVLGALFIGVAVAPANDIYNERELLNSMGISQPTVVFVSKKGLQKILNVQKKLPIIQKIIIMDSKTDYQGFQSMYTFVTSHLPPGFNEYDFVPESFDRDKTIALIMNSSGSTGLPKGVALPHRTACVRFSHARDPIFGNQIIPDTAILSVVPFHHGFGMFTTLGYLICGFRVVLMYRFEEELFLRSLQDYKIQSALLVPTLFSFFAKSTLIDKYDLSNLHEIASGGAPLSKEVGEAVAKRFHLPGIRQGYGLTETTSAILITPEGDDKPGAVGKVVPFFEAKVVDLDTGKTLGVNQRGELCVRGPMIMSGYVNNPEATNALIDKDGWLHSGDIAYWDEDEHFFIVDRLKSLIKYKGYQVAPAELESILLQHPNIFDAGVAGLPDDDAGELPAAVVVLEHGKTMTEKEIVDYVASQVTTAKKLRGGVVFVDEVPKGLTGKLDARKIREILIKAKKGGKSKL

SEQ ID NO: 2710 - protein, 420 aa, synthetic construct
  REGION 1..420: note = Description of Artificial Sequence: Synthetic Construct
MGVQVETISPGDGRTFPKRGQTCVVHYTGMLEDGKKVDSSRDRNKPFKFMLGKQEVIRGWEEGVAQMSVGQRAKLTISPDYAYGATGHPGIIPPHATLVFDVELLKPESGTSKVYDPEQRKRMITGPQWWARCKQMNVLDSFINYYDSEKHAENAVIFLHGNAASSYLWRHVVPHIEPVARCIIPDLIGMGKSGKSGNGSYRLLDHYKYLTAWFELLNLPKKIIFVGHDWGACLAFHYSYEHQDKIKAIVHAESVVDVIESWDEWPDIEEDIALIKSEEGEKMVLENNFFVETMLPSKIMRKLEPEEFAAYLEPFKEKGEVRRPTLSWPREIPLVKGGKPDVVQIVRNYNAYLRASDDLPKMFIESDPGFFSNAIVEGAKKFPNTEFVKVKGLHFSQEDAPDEMGKYIKSFVERVLKNEQ

SEQ ID NO: 2711 - protein, 471 aa, synthetic construct
  REGION 1..471: note = Description of Artificial Sequence: Synthetic Construct
MISLIAALAVDYVIGMENAMPWNLPADLAWFKRNTLNKPVIMGRHTWESIGRPLPGRKNIILSSQPGTDDRVTWVKSVDEAIAACGDVPEIMVIGGGRVIEQFLPKAQKLYLTHIDAEVEGDTHFPDYEPDDWESVFSEFHDADAQNSHSYCFEILERRSGTSKVYDPEQRKRMITGPQWWARCKQMNVLDSFINYYDSEKHAENAVIFLHGNAASSYLWRHVVPHIEPVARCIIPDLIGMGKSGKSGNGSYRLLDHYKYLTAWFELLNLPKKIIFVGHDWGACLAFHYSYEHQDKIKAIVHAESVVDVIESWDEWPDIEEDIALIKSEEGEKMVLENNFFVETMLPSKIMRKLEPEEFAAYLEPFKEKGEVRRPTLSWPREIPLVKGGKPDVVQIVRNYNAYLRASDDLPKMFIESDPGFFSNAIVEGAKKFPNTEFVKVKGLHFSQEDAPDEMGKYIKSFVERVLKNEQ

SEQ ID NO: 2712 - protein, 420 aa, synthetic construct
  REGION 1..420: note = Description of Artificial Sequence: Synthetic Construct
MTSKVYDPEQRKRMITGPQWWARCKQMNVLDSFINYYDSEKHAENAVIFLHGNAASSYLWRHVVPHIEPVARCIIPDLIGMGKSGKSGNGSYRLLDHYKYLTAWFELLNLPKKIIFVGHDWGACLAFHYSYEHQDKIKAIVHAESVVDVIESWDEWPDIEEDIALIKSEEGEKMVLENNFFVETMLPSKIMRKLEPEEFAAYLEPFKEKGEVRRPTLSWPREIPLVKGGKPDVVQIVRNYNAYLRASDDLPKMFIESDPGFFSNAIVEGAKKFPNTEFVKVKGLHFSQEDAPDEMGKYIKSFVERVLKNEQSGGVQVETISPGDGRTFPKRGQTCVVHYTGMLGDGKKVDSSRDRNKPFKFMLGKQEVIRGWEEGVAQMSVGQGAKLTISPDYAYGATGHPGIIPPHATLVFDVELLELE

SEQ ID NO: 2713 - protein, 471 aa, synthetic construct
  REGION 1..471: note = Description of Artificial Sequence: Synthetic Construct
MTSKVYDPEQRKRMITGPQWWARCKQMNVLDSFINYYDSEKHAENAVIFLHGNAASSYLWRHVVPHIEPVARCIIPDLIGMGKSGKSGNGSYRLLDHYKYLTAWFELLNLPKKIIFVGHDWGACLAFHYSYEHQDKIKAIVHAESVVDVIESWDEWPDIEEDIALIKSEEGEKMVLENNFFVETMLPSKIMRKLEPEEFAAYLEPFKEKGEVRRPTLSWPREIPLVKGGKPDVVQIVRNYNAYLRASDDLPKMFIESDPGFFSNAIVEGAKKFPNTEFVKVKGLHFSQEDAPDEMGKYIKSFVERVLKNEQSGISLIAALAVDYVIGMENAMPWNLPADLAWFKRNTLNKPVIMGRHTWESIGRPLPGRKNIILSSQPGTDDRVTWVKSVDEAIAACGDVPEIMVIGGGRVIEQFLPKAQKLYLTHIDAEVEGDTHFPDYEPDDWESVFSEFHDADAQNSHSYCFEILERR

SEQ ID NO: 2714 - DNA, 1335 bp, synthetic construct; identical to SEQ ID NO: 1798
  misc_feature 1..1335: note = Description of Artificial Sequence: Synthetic promoter
  source 1..1335: mol_type = other DNA

SEQ ID NO: 2715 - DNA, 399 bp, synthetic construct; identical to SEQ ID NO: 1797
  misc_feature 1..399: note = Description of Artificial Sequence: Synthetic promoter
  source 1..399: mol_type = other DNA

SEQ ID NO: 2716 - DNA, 1339 bp, synthetic construct; identical to SEQ ID NO: 1796
  misc_feature 1..1339: note = Description of Artificial Sequence: Synthetic promoter
  source 1..1339: mol_type = other DNA

SEQ ID NO: 2717 - DNA, 600 bp, synthetic construct
  misc_feature 1..600: note = Description of Artificial Sequence: Synthetic promoter
  source 1..600: mol_type = other DNA
aagcttgggagttccgcgttacataacttacggtaaatggcccgcctggctgaccgcccaacgacccccgcccattgacgtcaataatgacgtatgttcccatagtaacgccaatagggactttccattgacgtcaatgggtggagtatttacggtaaactgcccacttggcagtacatcaagtgtatcatatgccaagtacgccccctattgacgtcaatgacggtaaatggcccgcctggcattatgcccagtacatgaccttatgggactttcctacttggcagtacatctacgtattagtcatcgctattaccatggtgatgcggttttggcagtacatcaatgggcgtggatagcggtttgactcacggggatttccaagtctccaccccattgacgtcaatgggagtttgttttggcaccaaaatcaacgggactttccaaaatgtcgtaacaactccgccccattgacgcaaatgggcggtaggcgtgtacggtgggaggtctatataagcagagctcgtttagtgaaccgtcagatcgcctggagacgccatccacgctgttttgacctccatagaagacaccgactctact

SEQ ID NO: 2718 - DNA, 603 bp, synthetic construct; identical to SEQ ID NO: 1795
  misc_feature 1..603: note = Description of Artificial Sequence: Synthetic promoter
  source 1..603: mol_type = other DNA

SEQ ID NO: 2719 - DNA, 399 bp, synthetic construct; identical to SEQ ID NO: 1797
  misc_feature 1..399: note = Description of Artificial Sequence: Synthetic promoter
  source 1..399: mol_type = other DNA

SEQ ID NO: 2720 - DNA, 1339 bp, synthetic construct; identical to SEQ ID NO: 1796
  misc_feature 1..1339: note = Description of Artificial Sequence: Synthetic promoter
  source 1..1339: mol_type = other DNA

SEQ ID NO: 2721 - DNA, 1335 bp, synthetic construct; identical to SEQ ID NO: 1798
  misc_feature 1..1335: note = Description of Artificial Sequence: Synthetic promoter
  source 1..1335: mol_type = other DNA

SEQ ID NO: 2722 - DNA, 21 bp, synthetic construct
  misc_feature 1..21: note = Description of Artificial Sequence: Synthetic forward primer
  source 1..21: mol_type = other DNA
gaattcctcgaggccaccatg

SEQ ID NO: 2723 - DNA, 20 bp, synthetic construct
  misc_feature 1..20: note = Description of Artificial Sequence: Synthetic reverse primer
  source 1..20: mol_type = other DNA
ccaccagagccaccactagt

SEQ ID NO: 2724 - protein, 158 aa, synthetic construct; identical to SEQ ID NO: 1174
  REGION 1..158: note = Description of Artificial Sequence: Synthetic destabilizing domain (DD)

SEQ ID NO: 2725 - protein, 239 aa, synthetic construct; identical to SEQ ID NO: 1181
  REGION 1..239: note = Description of Artificial Sequence: Synthetic polypeptide

SEQ ID NO: 2726 - DNA, 561 bp, synthetic construct; identical to SEQ ID NO: 90
  misc_feature 1..561: note = Description of Artificial Sequence: Synthetic Destabilizing Domain (DD)
  source 1..561: mol_type = other DNA

SEQ ID NO: 2727 - DNA, 1416 bp, synthetic construct
  misc_feature 1..1416: note = Description of Artificial Sequence: Synthetic Construct
  source 1..1416: mol_type = other DNA
atgacttccaaggtgtacgaccccgagcaacgcaaacgcatgatcactgggcctcagtggtgggctcgctgcaagcaaatgaacgtgctggactccttcatcaactactatgattccgagaagcacgccgagaacgccgtgatttttctgcatggtaacgctgcctccagctacctgtggaggcacgtcgtgcctcacatcgagcccgtggctagatgcatcatccctgatctgatcggaatgggtaagtccggcaagagcgggaatggctcatatcgcctcctggatcactacaagtacctcaccgcttggttcgagctgctgaaccttccaaagaaaatcatctttgtgggccacgactggggggcttgtctggcctttcactactcctacgagcaccaagacaagatcaaggccatcgtccatgctgagagtgtcgtggacgtgatcgagtcctgggacgagtggcctgacatcgaggaggatatcgccctgatcaagagcgaagagggcgagaaaatggtgcttgagaataacttcttcgtcgagaccatgctcccaagcaagatcatgcggaaactggagcctgaggagttcgctgcctacctggagccattcaaggagaagggcgaggttagacggcctaccctctcctggcctcgcgagatccctctcgttaagggaggcaagcccgacgtcgtccagattgtccgcaactacaacgcctaccttcgggccagcgacgatctgcctaagatgttcatcgagtccgaccctgggttcttttccaacgctattgtcgagggagctaagaagttccctaacaccgagttcgtgaaggtgaagggcctccacttcagccaggaggacgctccagatgaaatgggtaagtacatcaagagcttcgtggagcgcgtgctgaagaacgagcagagcggcatctctctgattgcggcgctggcagttgactacgttattggcatggaaaacgcgatgccatggaacctcccggctgacctggcgtggttcaaacgtaacaccctgaacaaacctgtgatcatgggtcgtcacacctgggaatctattggccgtcctctcccgggtcgtaaaaacatcattctgtcttctcagccaggcaccgacgaccgtgttacctgggttaaaagcgttgacgaagcgattgctgcgtgcggtgatgttcctgaaattatggtgatcggcggtggccgtgttatcgaacagttcctgccgaaagcgcagaaactgtacctgacccacatcgacgcggaagttgaaggtgacacccacttcccggactacgaaccggatgattgggagagcgtattctccgaattccatgatgcggatgcgcaaaactctcattcttactgttttgaaatcctggaacgtcgttga

SEQ ID NO: 2728 - protein, 6 aa, synthetic construct
  REGION 1..6: note = Description of Artificial Sequence: Synthetic peptide
GGSGGG

SEQ ID NO: 2729 - protein, 5 aa, synthetic construct
  REGION 1..5: note = Description of Artificial Sequence: Synthetic peptide
GGSGG

SEQ ID NO: 2730 - protein, 26 aa, synthetic construct
  REGION 1..26: note = Description of Artificial Sequence: Synthetic peptide
SGGGSGGGGSGGGGSGGGGSGGGSLQ

SEQ ID NO: 2731 - protein, 15 aa, synthetic construct
  REGION 1..15: note = Description of Artificial Sequence: Synthetic peptide
GGGGSGGGGSGGGGS

SEQ ID NO: 2732 - protein, 9 aa, synthetic construct
  REGION 1..9: note = Description of Artificial Sequence: Synthetic peptide
SARNRQKRS

SEQ ID NO: 2733 - protein, 8 aa, synthetic construct
  REGION 1..8: note = Description of Artificial Sequence: Synthetic peptide
ARNRQKRS

SEQ ID NO: 2734 - protein, 12 aa, synthetic construct
  REGION 1..12: note = Description of Artificial Sequence: Synthetic peptide
ESRRVRRNKRSK

SEQ ID NO: 2735 - protein, 4 aa, synthetic construct
  REGION 1..4: note = Description of Artificial Sequence: Synthetic peptide
GGSG

SEQ ID NO: 2736 - DNA, 21 bp, synthetic construct
  misc_feature 1..21: note = Description of Artificial Sequence: Synthetic primer
  source 1..21: mol_type = other DNA
gaattcctcgaggccaccatg

SEQ ID NO: 2737 - DNA, 20 bp, synthetic construct
  misc_feature 1..20: note = Description of Artificial Sequence: Synthetic primer
  source 1..20: mol_type = other DNA
ccaccagagccaccactagt

SEQ ID NO: 2738 - protein, 434 aa, synthetic construct; identical to SEQ ID NO: 1186
  REGION 1..434: note = Description of Artificial Sequence: Synthetic polypeptide

SEQ ID NO: 2739 - protein, 110 aa, Homo sapiens
RRHQGKQNELSDTAGREINLVDAHLKSEQTEASTRQNSQVLLSETGIYDNDPDLCFRMQEGSEVYSNPCLEENKPGVYASLNHSVIGPNSRLARNVKEAPTEYASICVRS

SEQ ID NO: 2740 - protein, 13 aa, synthetic construct
  REGION 1..13: note = Description of Artificial Sequence: Synthetic peptide
GGGGSGGGSGGGS

SEQ ID NO: 2741 - protein, 234 aa, Homo sapiens; identical to SEQ ID NO: 634
  MOD_RES 91: note = Selenocysteine

SEQ ID NO: 2742 - protein, 415 aa, Homo sapiens; identical to SEQ ID NO: 744

SEQ ID NO: 2743 - protein, 22 aa, synthetic construct
  REGION 1..22: note = Description of Artificial Sequence: Synthetic peptide
MLLLVTSLLLCELPHPAFLLIP

SEQ ID NO: 2744 - protein, 8 aa, synthetic construct
  REGION 1..8: note = Description of Artificial Sequence: Synthetic peptide
DYKDDDDK

SEQ ID NO: 2745 - protein, 186 aa, synthetic construct; identical to SEQ ID NO: 71
  REGION 1..186: note = Description of Artificial Sequence: Synthetic polypeptide

SEQ ID NO: 2746 - protein, 69 aa, Homo sapiens; identical to SEQ ID NO: 607

SEQ ID NO: 2747 - protein, 21 aa, Homo sapiens
MALPVTALLLPLALLLHAARP

SEQ ID NO: 2748 - protein, 22 aa, Homo sapiens
MCHQQLVISWFSLVFLASPLVA

SEQ ID NO: 2749 - protein, 306 aa, Homo sapiens; identical to SEQ ID NO: 734

SEQ ID NO: 2750 - protein, 197 aa, Homo sapiens; identical to SEQ ID NO: 735

SEQ ID NO: 2751 - protein, 114 aa, Homo sapiens; identical to SEQ ID NO: 718

SEQ ID NO: 2752 - protein, 237 aa, Homo sapiens; identical to SEQ ID NO: 724

SEQ ID NO: 2753 - protein, 235 aa, synthetic construct; identical to SEQ ID NO: 1625
  REGION 1..235: note = Description of Artificial Sequence: Synthetic polypeptide

SEQ ID NO: 2754 - protein, 5 aa, synthetic construct
  REGION 1..5: note = Description of Artificial Sequence: Synthetic peptide
GGSGG

SEQ ID NO: 2755 - protein, 15 aa, synthetic construct
  REGION 1..15: note = Description of Artificial Sequence: Synthetic peptide
GGGGSGGGGSGGGGS

SEQ ID NO: 2756 - protein, 4 aa, synthetic construct
  REGION 1..4: note = Description of Artificial Sequence: Synthetic peptide
GGSG

SEQ ID NO: 2757 - protein, 22 aa, synthetic construct
  REGION 1..22: note = Description of Artificial Sequence: Synthetic peptide
MLLLVTSLLLCELPHPAFLLIP

SEQ ID NO: 2758 - protein, 26 aa, synthetic construct
  REGION 1..26: note = Description of Artificial Sequence: Synthetic peptide
SGGGSGGGGSGGGGSGGGGSGGGSLQ

SEQ ID NO: 2759 - protein, 12 aa, synthetic construct
  REGION 1..12: note = Description of Artificial Sequence: Synthetic peptide
ESRRVRRNKRSK

SEQ ID NO: 2760 - DNA, 32 bp, synthetic construct; identical to SEQ ID NO: 1659
  misc_feature 1..32: note = Description of Artificial Sequence: Synthetic oligonucleotide
  source 1..32: mol_type = other DNA

SEQ ID NO: 2761 - protein, 6 aa, synthetic construct
  REGION 1..6: note = Description of Artificial Sequence: Synthetic peptide
EFSTEF

SEQ ID NO: 2762 - protein, 21 aa, synthetic construct
  REGION 1..21: note = Description of Artificial Sequence: Synthetic peptide
LLLVTSLLLCELPHPAFLLIP

SEQ ID NO: 2763 - protein, 4 aa, synthetic construct
  REGION 1..4: note = Description of Artificial Sequence: Synthetic peptide
ASFE

SEQ ID NO: 2764 - protein, 42 aa, Homo sapiens; identical to SEQ ID NO: 426

SEQ ID NO: 2765 - protein, 243 aa, synthetic construct; identical to SEQ ID NO: 1732
  REGION 1..243: note = Description of Artificial Sequence: Synthetic polypeptide

SEQ ID NO: 2766 - protein, 21 aa, Homo sapiens
MALPVTALLLPLALLLHAARP

SEQ ID NO: 2767 - protein, 45 aa, Homo sapiens; identical to SEQ ID NO: 601

SEQ ID NO: 2768 - protein, 24 aa, Homo sapiens
IYIWAPLAGTCGVLLLSLVITLYC

SEQ ID NO: 2769 - protein, 112 aa, Homo sapiens; identical to SEQ ID NO: 419

SEQ ID NO: 2770 - protein, 186 aa, synthetic construct; identical to SEQ ID NO: 13
  REGION 1..186: note = Description of Artificial Sequence: Synthetic polypeptide

SEQ ID NO: 2771 - protein, 431 aa, Homo sapiens; identical to SEQ ID NO: 745

SEQ ID NO: 2772 - protein, 246 aa, synthetic construct; identical to SEQ ID NO: 1745
  REGION 1..246: note = Description of Artificial Sequence: Synthetic polypeptide

SEQ ID NO: 2773 - protein, 69 aa, Homo sapiens; identical to SEQ ID NO: 607

SEQ ID NO: 2774 - protein, 158 aa, synthetic construct; identical to SEQ ID NO: 1174
  REGION 1..158: note = Description of Artificial Sequence: Synthetic polypeptide

SEQ ID NO: 2775 - protein, 107 aa, synthetic construct; identical to SEQ ID NO: 1177
  REGION 1..107: note = Description of Artificial Sequence: Synthetic polypeptide

SEQ ID NO: 2776 - protein, 20 aa, Homo sapiens
MYRMQLLSCIALSLALVTNS

SEQ ID NO: 2777 - protein, 6 aa, synthetic construct
  REGION 1..6: note = Description of Artificial Sequence: Synthetic peptide
EFSTEF

SEQ ID NO: 2778 - protein, 107 aa, synthetic construct; identical to SEQ ID NO: 1176
  REGION 1..107: note = Description of Artificial Sequence: Synthetic polypeptide

SEQ ID NO: 2779 - protein, 19 aa, synthetic construct
  REGION 1..19: note = Description of Artificial Sequence: Synthetic peptide
ATNFSLLKQAGDVEENPGP

SEQ ID NO: 2780 - protein, 9 aa, Homo sapiens
SARNRQKRS

SEQ ID NO: 2781 - protein, 8 aa, Homo sapiens
ARNRQKRS

SEQ ID NO: 2782 - protein, 20 aa, synthetic construct
  REGION 1..20: note = Description of Artificial Sequence: Synthetic peptide
GATNFSLLKQAGDVEENPGP

SEQ ID NO: 2783 - protein, 306 aa, synthetic construct; identical to SEQ ID NO: 1807
  REGION 1..306: note = Description of Artificial Sequence: Synthetic polypeptide

SEQ ID NO: 2784 - protein, 652 aa, synthetic construct; identical to SEQ ID NO: 1821
  REGION 1..652: note = Description of Artificial Sequence: Synthetic polypeptide

SEQ ID NO: 2785 - protein, 653 aa, synthetic construct; identical to SEQ ID NO: 1823
  REGION 1..653: note = Description of Artificial Sequence: Synthetic polypeptide

SEQ ID NO: 2786 - protein, 656 aa, synthetic construct; identical to SEQ ID NO: 1825
  REGION 1..656: note = Description of Artificial Sequence: Synthetic polypeptide

SEQ ID NO: 2787 - protein, 655 aa, synthetic construct; identical to SEQ ID NO: 1827
  REGION 1..655: note = Description of Artificial Sequence: Synthetic polypeptide

SEQ ID NO: 2788 - protein, 651 aa, synthetic construct; identical to SEQ ID NO: 1829
  REGION 1..651: note = Description of Artificial Sequence: Synthetic polypeptide

SEQ ID NO: 2789 - protein, 540 aa, synthetic construct; identical to SEQ ID NO: 1831
  REGION 1..540: note = Description of Artificial Sequence: Synthetic polypeptide

SEQ ID NO: 2790 - protein, 710 aa, synthetic construct; identical to SEQ ID NO: 1833
  REGION 1..710: note = Description of Artificial Sequence: Synthetic polypeptide

SEQ ID NO: 2791 - protein, 738 aa, synthetic construct; identical to SEQ ID NO: 1835
  REGION 1..738: note = Description of Artificial Sequence: Synthetic polypeptide

SEQ ID NO: 2792 - protein, 659 aa, synthetic construct; identical to SEQ ID NO: 1837
  REGION 1..659: note = Description of Artificial Sequence: Synthetic polypeptide

SEQ ID NO: 2793 - protein, 20 aa, Homo sapiens
MYRMQLLSCIALSLALVTNS

SEQ ID NO: 2794 - protein, 18 aa, Homo sapiens
MDWTWILFLVAAATRVHS

SEQ ID NO: 2795 - protein, 6 aa, synthetic construct
  REGION 1..6: note = Description of Artificial Sequence: Synthetic peptide
EFSTEF

SEQ ID NO: 2796 - protein, 134 aa, synthetic construct; identical to SEQ ID NO: 1856
  REGION 1..134: note = Description of Artificial Sequence: Synthetic polypeptide

SEQ ID NO: 2797 - protein, 303 aa, synthetic construct; identical to SEQ ID NO: 1858
  REGION 1..303: note = Description of Artificial Sequence: Synthetic polypeptide

SEQ ID NO: 2798 - protein, 143 aa, synthetic construct; identical to SEQ ID NO: 1860
  REGION 1..143: note = Description of Artificial Sequence: Synthetic polypeptide

SEQ ID NO: 2799 - protein, 389 aa, synthetic construct; identical to SEQ ID NO: 1862
  REGION 1..389: note = Description of Artificial Sequence: Synthetic polypeptide

SEQ ID NO: 2800 - protein, 577 aa, synthetic construct; identical to SEQ ID NO: 1864
  REGION 1..577: note = Description of Artificial Sequence: Synthetic polypeptide

SEQ ID NO: 2801 - protein, 20 aa, Homo sapiens
MYRMQLLSCIALSLALVTNS

SEQ ID NO: 2802 - protein, 18 aa, Homo sapiens
MDWTWILFLVAAATRVHS

SEQ ID NO: 2803 - protein, 6 aa, synthetic construct
  REGION 1..6: note = Description of Artificial Sequence: Synthetic peptide
EFSTEF

SEQ ID NO: 2804 - protein, 5 aa, synthetic construct
  REGION 1..5: note = Description of Artificial Sequence: Synthetic peptide
GGSGG

SEQ ID NO: 2805 - protein, 9 aa, synthetic construct
  REGION 1..9: note = Description of Artificial Sequence: Synthetic peptide
YPYDVPDYA

SEQ ID NO: 2806 - protein, 20 aa, synthetic construct
  REGION 1..20: note = Description of Artificial Sequence: Synthetic peptide
GATNFSLLKQAGDVEENPGP

SEQ ID NO: 2807 - protein, 235 aa, synthetic construct; identical to SEQ ID NO: 1625
  REGION 1..235: note = Description of Artificial Sequence: Synthetic polypeptide

SEQ ID NO: 2808 - protein, 158 aa, synthetic construct; identical to SEQ ID NO: 1174
  REGION 1..158: note = Description of Artificial Sequence: Synthetic polypeptide

SEQ ID NO: 2809 - protein, 186 aa, synthetic construct; identical to SEQ ID NO: 13
  REGION 1..186: note = Description of Artificial Sequence: Synthetic polypeptide

SEQ ID NO: 2810 - protein, 134 aa, synthetic construct; identical to SEQ ID NO: 1856
  REGION 1..134: note = Description of Artificial Sequence: Synthetic polypeptide

SEQ ID NO: 2811 - protein, 303 aa, synthetic construct; identical to SEQ ID NO: 1858
  REGION 1..303: note = Description of Artificial Sequence: Synthetic polypeptide

SEQ ID NO: 2812 - protein, 143 aa, synthetic construct; identical to SEQ ID NO: 1860
  REGION 1..143: note = Description of Artificial Sequence: Synthetic polypeptide

SEQ ID NO: 2813 - protein, 389 aa, synthetic construct; identical to SEQ ID NO: 1862
  REGION 1..389: note = Description of Artificial Sequence: Synthetic polypeptide

SEQ ID NO: 2814 - protein, 577 aa, synthetic construct; identical to SEQ ID NO: 1864
  REGION 1..577: note = Description of Artificial Sequence: Synthetic polypeptide

SEQ ID NO: 2815 - protein, 30 aa, Homo sapiens; identical to SEQ ID NO: 1919

SEQ ID NO: 2816 - protein, 5 aa, synthetic construct
  REGION 1..5: note = Description of Artificial Sequence: Synthetic peptide
SGGGS

SEQ ID NO: 2817 - protein, 34 aa, synthetic construct; identical to SEQ ID NO: 1924
  REGION 1..34: note = Description of Artificial Sequence: Synthetic polypeptide

SEQ ID NO: 2818 - protein, 20 aa, synthetic construct
  REGION 1..20: note = Description of Artificial Sequence: Synthetic peptide
SGGGSGGGGSGGGGSGGGGS

SEQ ID NO: 2819 - DNA, 28 bp, synthetic construct
  misc_feature 1..28: note = Description of Artificial Sequence: Synthetic oligonucleotide
  source 1..28: mol_type = other DNA
tctagataatacgactcactagagatcc

SEQ ID NO: 2820 - DNA, 16 bp, synthetic construct
  misc_feature 1..16: note = Description of Artificial Sequence: Synthetic oligonucleotide
  source 1..16: mol_type = other DNA
tatggccacaaccatg

SEQ ID NO: 2821 - DNA, 30 bp, synthetic construct; identical to SEQ ID NO: 1934
  misc_feature 1..30: note = Description of Artificial Sequence: Synthetic oligonucleotide
  source 1..30: mol_type = other DNA

SEQ ID NO: 2822 - protein, 175 aa, Homo sapiens; identical to SEQ ID NO: 725

SEQ ID NO: 2823 - protein, 235 aa, synthetic construct; identical to SEQ ID NO: 1939
  REGION 1..235: note = Description of Artificial Sequence: Synthetic polypeptide

SEQ ID NO: 2824 - protein, 8 aa, synthetic construct
  REGION 1..8: note = Description of Artificial Sequence: Synthetic peptide
DYKDDDDK

SEQ ID NO: 2825 - protein, 555 aa, synthetic construct; identical to SEQ ID NO: 1949
  REGION 1..555: note = Description of Artificial Sequence: Synthetic polypeptide

SEQ ID NO: 2826 - protein, 504 aa, synthetic construct; identical to SEQ ID NO: 1951
  REGION 1..504: note = Description of Artificial Sequence: Synthetic polypeptide

SEQ ID NO: 2827 - protein, 395 aa, synthetic construct [sequence omitted]

SEQ ID NO: 2828 - protein, 555 aa, synthetic construct; identical to SEQ ID NO: 1955
  REGION 1..555: note = Description of Artificial Sequence: Synthetic polypeptide

SEQ ID NO: 2829 - protein, 583 aa, synthetic construct; identical to SEQ ID NO: 1957
  REGION 1..583: note = Description of Artificial Sequence: Synthetic polypeptide

SEQ ID NO: 2830 - protein, 583 aa, synthetic construct; identical to SEQ ID NO: 1959
  REGION 1..583: note = Description of Artificial Sequence: Synthetic polypeptide

SEQ ID NO: 2831 - protein, 583 aa, synthetic construct; identical to SEQ ID NO: 1961
  REGION 1..583: note = Description of Artificial Sequence: Synthetic polypeptide

SEQ ID NO: 2832 - protein, 583 aa, synthetic construct; identical to SEQ ID NO: 1963
  REGION 1..583: note = Description of Artificial Sequence: Synthetic polypeptide

SEQ ID NO: 2833 - protein, 583 aa, synthetic construct; identical to SEQ ID NO: 1965
  REGION 1..583: note = Description of Artificial Sequence: Synthetic polypeptide

SEQ ID NO: 2834 - protein, 404 aa, synthetic construct; identical to SEQ ID NO: 1967
  REGION 1..404: note = Description of Artificial Sequence: Synthetic polypeptide

SEQ ID NO: 2835 - protein, 403 aa, synthetic construct; identical to SEQ ID NO: 1969
  REGION 1..403: note = Description of Artificial Sequence: Synthetic polypeptide

SEQ ID NO: 2836 - protein, 403 aa, synthetic construct; identical to SEQ ID NO: 1971
  REGION 1..403: note = Description of Artificial Sequence: Synthetic polypeptide

SEQ ID NO: 2837 - protein, 371 aa, synthetic construct; identical to SEQ ID NO: 1973
  REGION 1..371: note = Description of Artificial Sequence: Synthetic polypeptide

SEQ ID NO: 2838 - protein, 407 aa, synthetic construct; identical to SEQ ID NO: 1975
  REGION 1..407: note = Description of Artificial Sequence: Synthetic polypeptide

SEQ ID NO: 2839 - protein, 397 aa, synthetic construct; identical to SEQ ID NO: 1977
  REGION 1..397: note = Description of Artificial Sequence: Synthetic polypeptide

SEQ ID NO: 2840 - protein, 555 aa, synthetic construct; identical to SEQ ID NO: 1955
  REGION 1..555: note = Description of Artificial Sequence: Synthetic polypeptide

SEQ ID NO: 2841 - protein, 407 aa, synthetic construct; identical to SEQ ID NO: 1975
  REGION 1..407: note = Description of Artificial Sequence: Synthetic polypeptide

SEQ ID NO: 2842 - protein, 573 aa, synthetic construct; identical to SEQ ID NO: 1984
  REGION 1..573: note = Description of Artificial Sequence: Synthetic polypeptide

SEQ ID NO: 2843 - protein, 414 aa, synthetic construct; identical to SEQ ID NO: 1986
  REGION 1..414: note = Description of Artificial Sequence: Synthetic polypeptide

SEQ ID NO: 2844 - protein, 601 aa, synthetic construct; identical to SEQ ID NO: 1988
  REGION 1..601: note = Description of Artificial Sequence: Synthetic polypeptide

SEQ ID NO: 2845 - protein, 601 aa, synthetic construct; identical to SEQ ID NO: 1990
  REGION 1..601: note = Description of Artificial Sequence: Synthetic polypeptide

SEQ ID NO: 2846 - protein, 601 aa, synthetic construct; identical to SEQ ID NO: 1992
  REGION 1..601: note = Description of Artificial Sequence: Synthetic polypeptide

SEQ ID NO: 2847 - protein, 601 aa, synthetic construct; identical to SEQ ID NO: 1994
  REGION 1..601: note = Description of Artificial Sequence: Synthetic polypeptide

SEQ ID NO: 2848 - protein, 601 aa, synthetic construct; identical to SEQ ID NO: 1996
  REGION 1..601: note = Description of Artificial Sequence: Synthetic polypeptide

SEQ ID NO: 2849 - protein, 601 aa, synthetic construct; identical to SEQ ID NO: 1998
  REGION 1..601: note = Description of Artificial Sequence: Synthetic polypeptide

SEQ ID NO: 2850 - protein, 681 aa, synthetic construct; identical to SEQ ID NO: 2000
  REGION 1..681: note = Description of Artificial Sequence: Synthetic polypeptide

SEQ ID NO: 2851 - protein, 652 aa, synthetic construct; identical to SEQ ID NO: 2002
  REGION 1..652: note = Description of Artificial Sequence: Synthetic polypeptide

SEQ ID NO: 2852 - protein, 320 aa, synthetic construct; identical to SEQ ID NO: 2004
  REGION 1..320: note = Description of Artificial Sequence: Synthetic polypeptide

SEQ ID NO: 2853 - protein, 14 aa, synthetic construct
  REGION 1..14: note = Description of Artificial Sequence: Synthetic peptide
YDSLEIPPLSLPPP

SEQ ID NO: 2854 - protein, 43 aa, synthetic construct; identical to SEQ ID NO: 697
  REGION 1..43: note = Description of Artificial Sequence: Synthetic polypeptide

SEQ ID NO: 2855 - protein, 102 aa, synthetic construct; identical to SEQ ID NO: 698
  REGION 1..102: note = Description of Artificial Sequence: Synthetic polypeptide

SEQ ID NO: 2856 - protein, 41 aa, synthetic construct; identical to SEQ ID NO: 699
  REGION 1..41: note = Description of Artificial Sequence: Synthetic polypeptide

SEQ ID NO: 2857 - protein, 24 aa, synthetic construct
  REGION 1..24: note = Description of Artificial Sequence: Synthetic peptide
ARARRITWPSSRSSCASRCTWRAP

SEQ ID NO: 2858 - protein, 23 aa, synthetic construct
  REGION 1..23: note = Description of Artificial Sequence: Synthetic peptide
TATSSRSRARARAAPTRAPRPPS

SEQ ID NO: 2859 - protein, 24 aa, synthetic construct
  REGION 1..24: note = Description of Artificial Sequence: Synthetic peptide
PRVAPCPSPGTSCPLSSCTAPRPT

SEQ ID NO: 2860 - protein, 9 aa, synthetic construct
  REGION 1..9: note = Description of Artificial Sequence: Synthetic peptide
STPPTSPTT

SEQ ID NO: 2861 - protein, 12 aa, synthetic construct
  REGION 1..12: note = Description of Artificial Sequence: Synthetic peptide
SCPSPRASSGSA

SEQ ID NO: 2862 - protein, 7 aa, synthetic construct
  REGION 1..7: note = Description of Artificial Sequence: Synthetic peptide
TSRTAAW

SEQ ID NO: 2863 - protein, 14 aa, synthetic construct
  REGION 1..14: note = Description of Artificial Sequence: Synthetic peptide
PRTPPCRTASSSTR

SEQ ID NO: 2864 - protein, 12 aa, synthetic construct
  REGION 1..12: note = Description of Artificial Sequence: Synthetic peptide
SCAAPTSPPTAP

SEQ ID NO: 2865 - protein, 21 aa, synthetic construct
  REGION 1..21: note = Description of Artificial Sequence: Synthetic peptide
CRRRPWAGRPPPSGCTPRTAP

SEQ ID NO: 2866 - protein, 7 aa, synthetic construct
  REGION 1..7: note = Description of Artificial Sequence: Synthetic peptide
RARSSRG

SEQ ID NO: 2867 - protein, 64 aa, synthetic construct; identical to SEQ ID NO: 710
  REGION 1..64: note = Description of Artificial Sequence: Synthetic polypeptide

SEQ ID NO: 2868 - protein, 320 aa, synthetic construct; identical to SEQ ID NO: 2004
  REGION 1..320: note = Description of Artificial Sequence: Synthetic polypeptide

SEQ ID NO: 2869 - protein, 235 aa, synthetic construct; identical to SEQ ID NO: 1939
  REGION 1..235: note = Description of Artificial Sequence: Synthetic polypeptide

SEQ ID NO: 2870 - protein, 134 aa, synthetic construct; identical to SEQ ID NO: 2025
  REGION 1..134: note = Description of Artificial Sequence: Synthetic polypeptide

SEQ ID NO: 2871 - protein, 7 aa, synthetic construct
  REGION 1..7: note = Description of Artificial Sequence: Synthetic peptide
NLDNTTH

SEQ ID NO: 2872 - protein, 19 aa, synthetic construct
  REGION 1..19: note = Description of Artificial Sequence: Synthetic peptide
RSRPSPSPPPNVTGRSRLE

SEQ ID NO: 2873 - protein, 60 aa, synthetic construct; identical to SEQ ID NO: 2028
  REGION 1..60: note = Description of Artificial Sequence: Synthetic polypeptide

SEQ ID NO: 2874 - protein, 29 aa, synthetic construct
  REGION 1..29: note = Description of Artificial Sequence: Synthetic peptide
RQTTSVATLCRQRNPPPGDRCLCGQKPRV

SEQ ID NO: 2875 - protein, 58 aa, synthetic construct; identical to SEQ ID NO: 2030
  REGION 1..58: note = Description of Artificial Sequence: Synthetic polypeptide

SEQ ID NO: 2876 - protein, 18 aa, synthetic construct
  REGION 1..18: note = Description of Artificial Sequence: Synthetic peptide
SRLKKRLGPPNHGDVVFL

SEQ ID NO: 2877 - protein, 12 aa, synthetic construct
  REGION 1..12: note = Description of Artificial Sequence: Synthetic peptide
YGHNHDEQGRGG

SEQ ID NO: 2878 - protein, 171 aa, synthetic construct; identical to SEQ ID NO: 2033
  REGION 1..171: note = Description of Artificial Sequence: Synthetic polypeptide

SEQ ID NO: 2879 - protein, 56 aa, synthetic construct; identical to SEQ ID NO: 2034
  REGION 1..56: note = Description of Artificial Sequence: Synthetic polypeptide

SEQ ID NO: 2880 - protein, 134 aa, synthetic construct; identical to SEQ ID NO: 2025
  REGION 1..134: note = Description of Artificial Sequence: Synthetic polypeptide

SEQ ID NO: 2881 - protein, 235 aa, synthetic construct; identical to SEQ ID NO: 1939
  REGION 1..235: note = Description of Artificial Sequence: Synthetic polypeptide

SEQ ID NO: 2882 - protein, 30 aa, Homo sapiens; identical to SEQ ID NO: 1919

SEQ ID NO: 2883 - protein, 26 aa, synthetic construct
  REGION 1..26: note = Description of Artificial Sequence: Synthetic peptide
SGGGSGGGGSGGGGSGGGGSGGGSLQ

SEQ ID NO: 2884 - protein, 5 aa, synthetic construct
  REGION 1..5: note = Description of Artificial Sequence: Synthetic peptide
SGGGS

SEQ ID NO: 2885 - protein, 34 aa, synthetic construct; identical to SEQ ID NO: 1924
  REGION 1..34: note = Description of Artificial Sequence: Synthetic polypeptide

SEQ ID NO: 2886 - protein, 20 aa, synthetic construct
  REGION 1..20: note = Description of Artificial Sequence: Synthetic peptide
SGGGSGGGGSGGGGSGGGGS

SEQ ID NO: 2887 - protein, 69 aa, Homo sapiens; identical to SEQ ID NO: 607

SEQ ID NO: 2888 - protein, 235 aa, synthetic construct; identical to SEQ ID NO: 1939
  REGION 1..235: note = Description of Artificial Sequence: Synthetic polypeptide

SEQ ID NO: 2889 - protein, 158 aa, synthetic construct; identical to SEQ ID NO: 1175
  REGION 1..158: note = Description of Artificial Sequence: Synthetic polypeptide

SEQ ID NO: 2890 - protein, 107 aa, synthetic construct; identical to SEQ ID NO: 1177
  REGION 1..107: note = Description of Artificial Sequence: Synthetic polypeptide

SEQ ID NO: 2891 - protein, 186 aa, synthetic construct; identical to SEQ ID NO: 41
  REGION 1..186: note = Description of Artificial Sequence: Synthetic polypeptide

SEQ ID NO: 2892 - protein, 186 aa, synthetic construct; identical to SEQ ID NO: 56
  REGION 1..186: note = Description of Artificial Sequence: Synthetic polypeptide

SEQ ID NO: 2893 - protein, 186 aa, synthetic construct; identical to SEQ ID NO: 1251
  REGION 1..186: note = Description of Artificial Sequence: Synthetic polypeptide

SEQ ID NO: 2894 - protein, 186 aa, synthetic construct; identical to SEQ ID NO: 1250
  REGION 1..186: note = Description of Artificial Sequence: Synthetic polypeptide

SEQ ID NO: 2895 - protein, 186 aa, synthetic construct; identical to SEQ ID NO: 1254
  REGION 1..186: note = Description of Artificial Sequence: Synthetic polypeptide

SEQ ID NO: 2896 - protein, 186 aa, synthetic construct; identical to SEQ ID NO: 1256
  REGION 1..186: note = Description of Artificial Sequence: Synthetic polypeptide

SEQ ID NO: 2897 - protein, 186 aa, synthetic construct; identical to SEQ ID NO: 33
  REGION 1..186: note = Description of Artificial Sequence: Synthetic polypeptide

SEQ ID NO: 2898 - protein, 186 aa, synthetic construct; identical to SEQ ID NO: 1255
  REGION 1..186: note = Description of Artificial Sequence: Synthetic polypeptide

SEQ ID NO: 2899 - protein, 555 aa, synthetic construct; identical to SEQ ID NO: 1949
  REGION 1..555: note = Description of Artificial Sequence: Synthetic polypeptide

SEQ ID NO: 2900 - protein, 504 aa, synthetic construct; identical to SEQ ID NO: 1951
  REGION 1..504: note = Description of Artificial Sequence: Synthetic polypeptide

SEQ ID NO: 2901 - protein, 395 aa, synthetic construct [sequence omitted]

SEQ ID NO: 2902 - protein, 555 aa, synthetic construct; identical to SEQ ID NO: 1955
  REGION 1..555: note = Description of Artificial Sequence: Synthetic polypeptide

SEQ ID NO: 2903 - protein, 583 aa, synthetic construct; identical to SEQ ID NO: 1957
  REGION 1..583: note = Description of Artificial Sequence: Synthetic polypeptide

SEQ ID NO: 2904 - protein, 583 aa, synthetic construct; identical to SEQ ID NO: 1959
  REGION 1..583: note = Description of Artificial Sequence: Synthetic polypeptide

SEQ ID NO: 2905 - protein, 583 aa, synthetic construct; identical to SEQ ID NO: 1961
  REGION 1..583: note = Description of Artificial Sequence: Synthetic polypeptide

SEQ ID NO: 2906 - protein, 583 aa, synthetic construct; identical to SEQ ID NO: 1963
  REGION 1..583: note = Description of Artificial Sequence: Synthetic polypeptide

SEQ ID NO: 2907 - protein, 583 aa, synthetic construct; identical to SEQ ID NO: 1965
  REGION 1..583: note = Description of Artificial Sequence: Synthetic polypeptide

SEQ ID NO: 2908 - protein, 404 aa, synthetic construct; identical to SEQ ID NO: 1967
  REGION 1..404: note = Description of Artificial Sequence: Synthetic polypeptide

SEQ ID NO: 2909 - protein, 403 aa, synthetic construct; identical to SEQ ID NO: 1969
  REGION 1..403: note = Description of Artificial Sequence: Synthetic polypeptide

SEQ ID NO: 2910 - protein, 403 aa, synthetic construct; identical to SEQ ID NO: 1971
  REGION 1..403: note = Description of Artificial Sequence: Synthetic polypeptide

SEQ ID NO: 2911 - protein, 371 aa, synthetic construct; identical to SEQ ID NO: 1973
  REGION 1..371: note = Description of Artificial Sequence: Synthetic polypeptide

SEQ ID NO: 2912 - protein, 407 aa, synthetic construct; identical to SEQ ID NO: 1975
  REGION 1..407: note = Description of Artificial Sequence: Synthetic polypeptide

SEQ ID NO: 2913 - protein, 397 aa, synthetic construct; identical to SEQ ID NO: 1977
  REGION 1..397: note = Description of Artificial Sequence: Synthetic polypeptide

SEQ ID NO: 2914 - protein, 555 aa, synthetic construct; identical to SEQ ID NO: 1955
  REGION 1..555: note = Description of Artificial Sequence: Synthetic polypeptide

SEQ ID NO: 2915 - protein, 407 aa, synthetic construct; identical to SEQ ID NO: 1975
  REGION 1..407: note = Description of Artificial Sequence: Synthetic polypeptide

SEQ ID NO: 2916 - protein, 371 aa, synthetic construct; identical to SEQ ID NO: 2140
  REGION 1..371: note = Description of Artificial Sequence: Synthetic polypeptide

SEQ ID NO: 2917 - protein, 573 aa, synthetic construct; identical to SEQ ID NO: 1984
  REGION 1..573: note = Description of Artificial Sequence: Synthetic polypeptide

SEQ ID NO: 2918 - protein, 414 aa, synthetic construct; identical to SEQ ID NO: 1986
  REGION 1..414: note = Description of Artificial Sequence: Synthetic polypeptide

SEQ ID NO: 2919 - protein, 601 aa, synthetic construct; identical to SEQ ID NO: 1988
  REGION 1..601: note = Description of Artificial Sequence: Synthetic polypeptide

SEQ ID NO: 2920 - protein, 601 aa, synthetic construct; identical to SEQ ID NO: 1990
  REGION 1..601: note = Description of Artificial Sequence: Synthetic polypeptide

SEQ ID NO: 2921 - protein, 601 aa, synthetic construct; identical to SEQ ID NO: 1992
  REGION 1..601: note = Description of Artificial Sequence: Synthetic polypeptide

SEQ ID NO: 2922 - protein, 601 aa, synthetic construct; identical to SEQ ID NO: 1994
  REGION 1..601: note = Description of Artificial Sequence: Synthetic polypeptide

SEQ ID NO: 2923 - protein, 601 aa, synthetic construct; identical to SEQ ID NO: 1996
  REGION 1..601: note = Description of Artificial Sequence: Synthetic polypeptide

SEQ ID NO: 2924 - protein, 601 aa, synthetic construct; identical to SEQ ID NO: 1998
  REGION 1..601: note = Description of Artificial Sequence: Synthetic polypeptide

SEQ ID NO: 2925 - protein, 681 aa, synthetic construct; identical to SEQ ID NO: 2000
  REGION 1..681: note = Description of Artificial Sequence: Synthetic polypeptide

SEQ ID NO: 2926 - protein, 652 aa, synthetic construct; identical to SEQ ID NO: 2002
  REGION 1..652: note = Description of Artificial Sequence: Synthetic polypeptide

SEQ ID NO: 2927 - protein, 320 aa, synthetic construct; identical to SEQ ID NO: 2004
  REGION 1..320: note = Description of Artificial Sequence: Synthetic polypeptide

SEQ ID NO: 2928 - protein, 14 aa, synthetic construct
  REGION 1..14: note = Description of Artificial Sequence: Synthetic peptide
YDSLEIPPLSLPPP

SEQ ID NO: 2929 - protein, 43 aa, synthetic construct; identical to SEQ ID NO: 697
  REGION 1..43: note = Description of Artificial Sequence: Synthetic polypeptide

SEQ ID NO: 2930 - protein, 102 aa, synthetic construct; identical to SEQ ID NO: 698
  REGION 1..102: note = Description of Artificial Sequence: Synthetic polypeptide

SEQ ID NO: 2931 - protein, 41 aa, synthetic construct; identical to SEQ ID NO: 699
  REGION 1..41: note = Description of Artificial Sequence: Synthetic polypeptide

SEQ ID NO: 2932 - protein, 24 aa, synthetic construct
  REGION 1..24: note = Description of Artificial Sequence: Synthetic peptide
ARARRITWPSSRSSCASRCTWRAP

SEQ ID NO: 2933 - protein, 23 aa, synthetic construct
  REGION 1..23: note = Description of Artificial Sequence: Synthetic peptide
TATSSRSRARARAAPTRAPRPPS

SEQ ID NO: 2934 - protein, 24 aa, synthetic construct
  REGION 1..24: note = Description of Artificial Sequence: Synthetic peptide
PRVAPCPSPGTSCPLSSCTAPRPT

SEQ ID NO: 2935 - protein, 9 aa, synthetic construct
  REGION 1..9: note = Description of Artificial Sequence: Synthetic peptide
STPPTSPTT

SEQ ID NO: 2936 - protein, 12 aa, synthetic construct
  REGION 1..12: note = Description of Artificial Sequence: Synthetic peptide
SCPSPRASSGSA

SEQ ID NO: 2937 - protein, 7 aa, synthetic construct
  REGION 1..7: note = Description of Artificial Sequence: Synthetic peptide
TSRTAAW

SEQ ID NO: 2938 - protein, 14 aa, synthetic construct
  REGION 1..14: note = Description of Artificial Sequence: Synthetic peptide
PRTPPCRTASSSTR

SEQ ID NO: 2939 - protein, 12 aa, synthetic construct
  REGION 1..12: note = Description of Artificial Sequence: Synthetic peptide
SCAAPTSPPTAP

SEQ ID NO: 2940 - protein, 21 aa, synthetic construct
  REGION 1..21: note = Description of Artificial Sequence: Synthetic peptide
CRRRPWAGRPPPSGCTPRTAP

SEQ ID NO: 2941 - protein, 7 aa, synthetic construct
  REGION 1..7: note = Description of Artificial Sequence: Synthetic peptide
RARSSRG

SEQ ID NO: 2942 - protein, 64 aa, synthetic construct; identical to SEQ ID NO: 710
  REGION 1..64: note = Description of Artificial Sequence: Synthetic polypeptide

SEQ ID NO: 2943 - protein, 320 aa, synthetic construct; identical to SEQ ID NO: 2004
  REGION 1..320: note = Description of Artificial Sequence: Synthetic polypeptide

SEQ ID NO: 2944 - protein, 235 aa, synthetic construct; identical to SEQ ID NO: 1939
  REGION 1..235: note = Description of Artificial Sequence: Synthetic polypeptide

SEQ ID NO: 2945 - protein, 134 aa, synthetic construct; identical to SEQ ID NO: 2025
  REGION 1..134: note = Description of Artificial Sequence: Synthetic polypeptide

SEQ ID NO: 2946 - protein, 7 aa, synthetic construct
  REGION 1..7: note = Description of Artificial Sequence: Synthetic peptide
NLDNTTH

SEQ ID NO: 2947 - protein, 19 aa, synthetic construct
  REGION 1..19: note = Description of Artificial Sequence: Synthetic peptide
RSRPSPSPPPNVTGRSRLE

SEQ ID NO: 2948 - protein, 60 aa, synthetic construct; identical to SEQ ID NO: 2028
  REGION 1..60: note = Description of Artificial Sequence: Synthetic polypeptide

SEQ ID NO: 2949 - protein, 29 aa, synthetic construct
  REGION 1..29: note = Description of Artificial Sequence: Synthetic peptide
RQTTSVATLCRQRNPPPGDRCLCGQKPRV

SEQ ID NO: 2950 - protein, 58 aa, synthetic construct; identical to SEQ ID NO: 2030
  REGION 1..58: note = Description of Artificial Sequence: Synthetic polypeptide

SEQ ID NO: 2951 - protein, 18 aa, synthetic construct
  REGION 1..18: note = Description of Artificial Sequence: Synthetic peptide
SRLKKRLGPPNHGDVVFL

SEQ ID NO: 2952 - protein, 12 aa, synthetic construct
  REGION 1..12: note = Description of Artificial Sequence: Synthetic peptide
YGHNHDEQGRGG

SEQ ID NO: 2953 - protein, 171 aa, synthetic construct; identical to SEQ ID NO: 2033
  REGION 1..171: note = Description of Artificial Sequence: Synthetic polypeptide

SEQ ID NO: 2954 - protein, 56 aa, synthetic construct; identical to SEQ ID NO: 2034
  REGION 1..56: note = Description of Artificial Sequence: Synthetic polypeptide

SEQ ID NO: 2955 - protein, 134 aa, synthetic construct; identical to SEQ ID NO: 2025
  REGION 1..134: note = Description of Artificial Sequence: Synthetic polypeptide

SEQ ID NO: 2956 - protein, 20 aa, Homo sapiens
MYRMQLLSCIALSLALVTNS

SEQ ID NO: 2957 - protein, 18 aa, Homo sapiens
MDWTWILFLVAAATRVHS

SEQ ID NO: 2958 - protein, 114 aa, Homo sapiens; identical to SEQ ID NO: 718

SEQ ID NO: 2959 - protein, 237 aa, Homo sapiens; identical to SEQ ID NO: 724

SEQ ID NO: 2960 - protein, 26 aa, synthetic construct
  REGION 1..26: note = Description of Artificial Sequence: Synthetic peptide
SGGGSGGGGSGGGGSGGGGSGGGSLQ

SEQ ID NO: 2961 - protein, 395 aa, synthetic construct [sequence omitted]

SEQ ID NO: 2962 - protein, 15 aa, synthetic construct
  REGION 1..15: note = Description of Artificial Sequence: Synthetic peptide
GGGGSGGGGSGGGGS

SEQ ID NO: 2963 - protein, 12 aa, synthetic construct
  REGION 1..12: note = Description of Artificial Sequence: Synthetic peptide
ESRRVRRNKRSK

SEQ ID NO: 2964 - protein, 306 aa, Homo sapiens; identical to SEQ ID NO: 734

SEQ ID NO: 2965 - protein, 197 aa, Homo sapiens; identical to SEQ ID NO: 735

SEQ ID NO: 2966 - protein, 193 aa, Homo sapiens; identical to SEQ ID NO: 2256

SEQ ID NO: 2967 - protein, 540 aa, synthetic construct; identical to SEQ ID NO: 1831
  REGION 1..540: note = Description of Artificial Sequence: Synthetic polypeptide

SEQ ID NO: 2968 - protein, 738 aa, synthetic construct; identical to SEQ ID NO: 1835
  REGION 1..738: note = Description of Artificial Sequence: Synthetic polypeptide

SEQ ID NO: 2969 - protein, 416 aa, Homo sapiens; identical to SEQ ID NO: 2260

SEQ ID NO: 2970 - protein, 415 aa, Homo sapiens; identical to SEQ ID NO: 744

SEQ ID NO: 2971 - protein, 5 aa, synthetic construct
  REGION 1..5: note = Description of Artificial Sequence: Synthetic peptide
SGGGS

SEQ ID NO: 2972 - protein, 607 aa, synthetic construct; identical to SEQ ID NO: 1151
  REGION 1..607: note = Description of Artificial Sequence: Synthetic polypeptide

SEQ ID NO: 2973 - protein, 607 aa, synthetic construct; identical to SEQ ID NO: 1152
  REGION 1..607: note = Description of Artificial Sequence: Synthetic polypeptide

SEQ ID NO: 2974 - protein, 607 aa, synthetic construct; identical to SEQ ID NO: 1153
  REGION 1..607: note = Description of Artificial Sequence: Synthetic polypeptide

SEQ ID NO: 2975 - protein, 285 aa, Homo sapiens; identical to SEQ ID NO: 2271

SEQ ID NO: 2976 - protein, 13 aa, synthetic construct
  REGION 1..13: note = Description of Artificial Sequence: Synthetic peptide
VDYPYDVPDYALD

SEQ ID NO: 2977 - protein, 5 aa, synthetic construct
  REGION 1..5: note = Description of Artificial Sequence: Synthetic peptide
SGGGS

SEQ ID NO: 2978 - protein, 107 aa, synthetic construct; identical to SEQ ID NO: 2282
  REGION 1..107: note = Description of Artificial Sequence: Synthetic polypeptide

SEQ ID NO: 2979 - protein, 159 aa, synthetic construct; identical to SEQ ID NO: 1173
  REGION 1..159: note = Description of Artificial Sequence: Synthetic polypeptide

SEQ ID NO: 2980 - protein, 158 aa, synthetic construct; identical to SEQ ID NO: 2286
  REGION 1..158: note = Description of Artificial Sequence: Synthetic polypeptide

SEQ ID NO: 2981 - protein, 187 aa, synthetic construct; identical to SEQ ID NO: 11
  REGION 1..187: note = Description of Artificial Sequence: Synthetic polypeptide

SEQ ID NO: 2982 - protein, 187 aa, synthetic construct; identical to SEQ ID NO: 27
  REGION 1..187: note = Description of Artificial Sequence: Synthetic polypeptide

SEQ ID NO: 2983 - protein, 187 aa, synthetic construct; identical to SEQ ID NO: 20
  REGION 1..187: note = Description of Artificial Sequence: Synthetic polypeptide

SEQ ID NO: 2984 - protein, 9 aa, Homo sapiens
SARNRQKRS

SEQ ID NO: 2985 - protein, 8 aa, Homo sapiens
ARNRQKRS

SEQ ID NO: 2986 - protein, 14 aa, synthetic construct
  REGION 1..14: note = Description of Artificial Sequence: Synthetic peptide
SGESRRVRRNKRSK

SEQ ID NO: 2987 - protein, 19 aa, synthetic construct
  REGION 1..19: note = Description of Artificial Sequence: Synthetic peptide
ATNFSLLKQAGDVEENPGP

SEQ ID NO: 2988 - protein, 4 aa, synthetic construct
  REGION 1..4: note = Description of Artificial Sequence: Synthetic peptide
NPGP

SEQ ID NO: 2989 - protein, 9 aa, Homo sapiens
SARNRQKRS

SEQ ID NO: 2990 - protein, 8 aa, Homo sapiens
ARNRQKRS

SEQ ID NO: 2991 - protein, 14 aa, synthetic construct
  REGION 1..14: note = Description of Artificial Sequence: Synthetic peptide
SGESRRVRRNKRSK

SEQ ID NO: 2992 - protein, 19 aa, synthetic construct
  REGION 1..19: note = Description of Artificial Sequence: Synthetic peptide
ATNFSLLKQAGDVEENPGP

SEQ ID NO: 2993 - protein, 20 aa, synthetic construct
  REGION 1..20: note = Description of Artificial Sequence: Synthetic peptide
GATNFSLLKQAGDVEENPGP

SEQ ID NO: 2994 - protein, 4 aa, synthetic construct
  REGION 1..4: note = Description of Artificial Sequence: Synthetic peptide
NPGP

SEQ ID NO: 2995 - protein, 9 aa, Homo sapiens
SARNRQKRS

SEQ ID NO: 2996 - protein, 8 aa, Homo sapiens
ARNRQKRS

SEQ ID NO: 2997 - protein, 12 aa, synthetic construct
  REGION 1..12: note = Description of Artificial Sequence: Synthetic peptide
ESRRVRRNKRSK

SEQ ID NO: 2998 - protein, 9 aa, synthetic construct
  REGION 1..9: note = Description of Artificial Sequence: Synthetic peptide
YPYDVPDYA

SEQ ID NO: 2999 - protein, 4 aa, synthetic construct
  REGION 1..4: note = Description of Artificial Sequence: Synthetic peptide
GGSG

SEQ ID NO: 3000 - protein, 5 aa, synthetic construct
  REGION 1..5: note = Description of Artificial Sequence: Synthetic peptide
GGGGG

SEQ ID NO: 3001 - protein, 5 aa, synthetic construct
  REGION 1..5: note = Description of Artificial Sequence: Synthetic peptide
GGGGG

SEQ ID NO: 3002 - protein, 5 aa, synthetic construct
  REGION 1..5: note = Description of Artificial Sequence: Synthetic peptide
GGGGS

SEQ ID NO: 3003 - protein, 10 aa, synthetic construct
  REGION 1..10: note = Description of Artificial Sequence: Synthetic peptide
GGGGSGGGGS

SEQ ID NO: 3004 - protein, 15 aa, synthetic construct
  REGION 1..15: note = Description of Artificial Sequence: Synthetic peptide
GGGGSGGGGSGGGGS

SEQ ID NO: 3005 - protein, 20 aa, synthetic construct
  REGION 1..20: note = Description of Artificial Sequence: Synthetic peptide
GGGGSGGGGSGGGGSGGGGS

SEQ ID NO: 3006 - protein, 25 aa, synthetic construct
  REGION 1..25: note = Description of Artificial Sequence: Synthetic peptide
GGGGSGGGGSGGGGSGGGGSGGGGS

SEQ ID NO: 3007 - protein, 30 aa, synthetic construct; identical to SEQ ID NO: 2399
  REGION 1..30: note = Description of Artificial Sequence: Synthetic polypeptide

SEQ ID NO: 3008 - protein, 5 aa, synthetic construct
  REGION 1..5: note = Description of Artificial Sequence: Synthetic peptide
SSSSG

SEQ ID NO: 3009 - protein, 10 aa, synthetic construct
  REGION 1..10: note = Description of Artificial Sequence: Synthetic peptide
SSSSGSSSSG

SEQ ID NO: 3010 - protein, 15 aa, synthetic construct
  REGION 1..15: note = Description of Artificial Sequence: Synthetic peptide
SSSSGSSSSGSSSSG

SEQ ID NO: 3011 - protein, 20 aa, synthetic construct
  REGION 1..20: note = Description of Artificial Sequence: Synthetic peptide
SSSSGSSSSGSSSSGSSSSG

SEQ ID NO: 3012 - protein, 25 aa, synthetic construct
  REGION 1..25: note = Description of Artificial Sequence: Synthetic peptide
SSSSGSSSSGSSSSGSSSSGSSSSG

SEQ ID NO: 3013 - protein, 30 aa, synthetic construct; identical to SEQ ID NO: 2405
  REGION 1..30: note = Description of Artificial Sequence: Synthetic polypeptide

SEQ ID NO: 3014 - protein, 6 aa, synthetic construct
  REGION 1..6: note = Description of Artificial Sequence: Synthetic peptide
EFSTEF

SEQ ID NO: 3015 - protein, 5 aa, synthetic construct
  REGION 1..5: note = Description of Artificial Sequence: Synthetic peptide
SGGGS

SEQ ID NO: 3016 - protein, 12 aa, synthetic construct
  REGION 1..12: note = Description of Artificial Sequence: Synthetic peptide
GKSSGSGSESKS

SEQ ID NO: 3017 - protein, 15 aa, synthetic construct
  REGION 1..15: note = Description of Artificial Sequence: Synthetic peptide
GGSTSGSGKSSEGKG

SEQ ID NO: 3018 - protein, 19 aa, synthetic construct
  REGION 1..19: note = Description of Artificial Sequence: Synthetic peptide
GSTSGSGKSSSEGSGSTKG

SEQ ID NO: 3019 - protein, 18 aa, synthetic construct
  REGION 1..18: note = Description of Artificial Sequence: Synthetic peptide
GSTSGSGKPGSGEGSTKG

SEQ ID NO: 3020 - protein, 13 aa, synthetic construct
  REGION 1..13: note = Description of Artificial Sequence: Synthetic peptide
VDYPYDVPDYALD

SEQ ID NO: 3021 - protein, 14 aa, synthetic construct
  REGION 1..14: note = Description of Artificial Sequence: Synthetic peptide
EGKSSGSGSESKEF

SEQ ID NO: 3022 - protein, 35 aa, synthetic construct; identical to SEQ ID NO: 2418
  REGION 1..35: note = Description of Artificial Sequence: Synthetic polypeptide

SEQ ID NO: 3023 - protein, 8 aa, synthetic construct
  REGION 1..8: note = Description of Artificial Sequence: Synthetic peptide
DYKDDDDK

SEQ ID NO: 3024 - protein, 34 aa, synthetic construct; identical to SEQ ID NO: 1924
  REGION 1..34: note = Description of Artificial Sequence: Synthetic polypeptide

SEQ ID NO: 3025 - protein, 34 aa, synthetic construct; identical to SEQ ID NO: 2424
  REGION 1..34: note = Description of Artificial Sequence: Synthetic polypeptide

SEQ ID NO: 3026 - protein, 22 aa, synthetic construct
  REGION 1..22: note = Description of Artificial Sequence: Synthetic peptide
GSGATNFSLLKQAGDVEENPGP

SEQ ID NO: 3027 - protein, 22 aa, synthetic construct
  REGION 1..22: note = Description of Artificial Sequence: Synthetic peptide
SGGGGSGGGGSGGGGSGGGSLQ

SEQ ID NO: 3028 - protein, 14 aa, synthetic construct
  REGION 1..14: note = Description of Artificial Sequence: Synthetic peptide
EGKSSGSGSESKEF

SEQ ID NO: 3029 - protein, 35 aa, synthetic construct; identical to SEQ ID NO: 2418
  REGION 1..35: note = Description of Artificial Sequence: Synthetic polypeptide

SEQ ID NO: 3030 - protein, 8 aa, synthetic construct
  REGION 1..8: note = Description of Artificial Sequence: Synthetic peptide
DYKDDDDK

SEQ ID NO: 3031 - protein, 34 aa, synthetic construct; identical to SEQ ID NO: 1924
  REGION 1..34: note = Description of Artificial Sequence: Synthetic polypeptide

SEQ ID NO: 3032 - protein, 34 aa, synthetic construct; identical to SEQ ID NO: 2424
  REGION 1..34: note = Description of Artificial Sequence: Synthetic polypeptide

SEQ ID NO: 3033 - protein, 34 aa, synthetic construct; identical to SEQ ID NO: 2424
  REGION 1..34: note = Description of Artificial Sequence: Synthetic polypeptide

SEQ ID NO: 3034 - protein, 22 aa, synthetic construct
  REGION 1..22: note = Description of Artificial Sequence: Synthetic peptide
GSGATNFSLLKQAGDVEENPGP

SEQ ID NO: 3035 - protein, 4 aa, synthetic construct
  REGION 1..4: note = Description of Artificial Sequence: Synthetic peptide
GGSG

SEQ ID NO: 3036 - protein, 5 aa, synthetic construct
  REGION 1..5: note = Description of Artificial Sequence: Synthetic peptide
GGSGG

SEQ ID NO: 3037 - protein, 6 aa, synthetic construct
  REGION 1..6: note = Description of Artificial Sequence: Synthetic peptide
GGSGGG

SEQ ID NO: 3038 - protein, 9 aa, synthetic construct
  REGION 1..9: note = Description of Artificial Sequence: Synthetic peptide
GGSGGGSGG

SEQ ID NO: 3039 - protein, 5 aa, synthetic construct
  REGION 1..5: note = Description of Artificial Sequence: Synthetic peptide
GGGGG

SEQ ID NO: 3040 - protein, 5 aa, synthetic construct
  REGION 1..5: note = Description of Artificial Sequence: Synthetic peptide
GGGGS

SEQ ID NO: 3041 - protein, 10 aa, synthetic construct
  REGION 1..10: note = Description of Artificial Sequence: Synthetic peptide
GGGGSGGGGS

SEQ ID NO: 3042 - protein, 15 aa, synthetic construct
  REGION 1..15: note = Description of Artificial Sequence: Synthetic peptide
GGGGSGGGGSGGGGS

SEQ ID NO: 3043 - protein, 26 aa, synthetic construct
  REGION 1..26: note = Description of Artificial Sequence: Synthetic peptide
SGGGSGGGGSGGGGSGGGGSGGGSLQ

SEQ ID NO: 3044 - protein, 20 aa, synthetic construct
  REGION 1..20: note = Description of Artificial Sequence: Synthetic peptide
GGGGSGGGGSGGGGSGGGGS

SEQ ID NO: 3045 - protein, 25 aa, synthetic construct
  REGION 1..25: note = Description of Artificial Sequence: Synthetic peptide
GGGGSGGGGSGGGGSGGGGSGGGGS

SEQ ID NO: 3046 - protein, 30 aa, synthetic construct; identical to SEQ ID NO: 2399
  REGION 1..30: note = Description of Artificial Sequence: Synthetic polypeptide

SEQ ID NO: 3047 - protein, 5 aa, synthetic construct
  REGION 1..5: note = Description of Artificial Sequence: Synthetic peptide
SSSSG

SEQ ID NO: 3048 - protein, 10 aa, synthetic construct
  REGION 1..10: note = Description of Artificial Sequence: Synthetic peptide
SSSSGSSSSG

SEQ ID NO: 3049 - protein, 15 aa, synthetic construct
  REGION 1..15: note = Description of Artificial Sequence: Synthetic peptide
SSSSGSSSSGSSSSG

SEQ ID NO: 3050 - protein, 20 aa, synthetic construct
  REGION 1..20: note = Description of Artificial Sequence: Synthetic peptide
SSSSGSSSSGSSSSGSSSSG

SEQ ID NO: 3051 - protein, 25 aa, synthetic construct
  REGION 1..25: note = Description of Artificial Sequence: Synthetic peptide
SSSSGSSSSGSSSSGSSSSGSSSSG

SEQ ID NO: 3052 - protein, 30 aa, synthetic construct; identical to SEQ ID NO: 2405
  REGION 1..30: note = Description of Artificial Sequence: Synthetic polypeptide

SEQ ID NO: 3053 - protein, 12 aa, synthetic construct
  REGION 1..12: note = Description of Artificial Sequence: Synthetic peptide
GKSSGSGSESKS

SEQ ID NO: 3054 - protein, 15 aa, synthetic construct
  REGION 1..15: note = Description of Artificial Sequence: Synthetic peptide
GGSTSGSGKSSEGKG

SEQ ID NO: 3055 - protein, 19 aa, synthetic construct
  REGION 1..19: note = Description of Artificial Sequence: Synthetic peptide
GSTSGSGKSSSEGSGSTKG

SEQ ID NO: 3056 - protein, 18 aa, synthetic construct
  REGION 1..18: note = Description of Artificial Sequence: Synthetic peptide
GSTSGSGKPGSGEGSTKG

SEQ ID NO: 3057 - protein, 20 aa, synthetic construct
  REGION 1..20: note = Description of Artificial Sequence: Synthetic peptide
SGGGSGGGGSGGGGSGGGGS

SEQ ID NO: 3058 - protein, 4 aa, synthetic construct
  REGION 1..4: note = Description of Artificial Sequence: Synthetic peptide
GGGG

SEQ ID NO: 3059 - protein, 8 aa, synthetic construct
  REGION 1..8: note = Description of Artificial Sequence: Synthetic peptide
GGGGGGGG

SEQ ID NO: 3060 - protein, 8 aa, synthetic construct
  REGION 1..8: note = Description of Artificial Sequence: Synthetic peptide
  MOD_RES 4: note = Any amino acid
DVEXNPGP

SEQ ID NO: 3061 - protein, 557 aa, Homo sapiens; identical to SEQ ID NO: 2690

SEQ ID NO: 3062 - protein, 556 aa, Homo sapiens [sequence omitted]

SEQ ID NO: 3063 - protein, 557 aa, Macaca mulatta; identical to SEQ ID NO: 2692

SEQ ID NO: 3064 - protein, 557 aa, synthetic construct; identical to SEQ ID NO: 2693
  REGION 1..557: note = Description of Artificial Sequence: Synthetic polypeptide

SEQ ID NO: 3065 - protein, 557 aa, synthetic construct; identical to SEQ ID NO: 2694
  REGION 1..557: note = Description of Artificial Sequence: Synthetic polypeptide

SEQ ID NO: 3066 - protein, 467 aa, synthetic construct; identical to SEQ ID NO: 2695
  REGION 1..467: note = Description of Artificial Sequence: Synthetic polypeptide

SEQ ID NO: 3067 - protein, 278 aa, synthetic construct; identical to SEQ ID NO: 2696
  REGION 1..278: note = Description of Artificial Sequence: Synthetic polypeptide

SEQ ID NO: 3068 - protein, 189 aa, synthetic construct; identical to SEQ ID NO: 2697
  REGION 1..189: note = Description of Artificial Sequence: Synthetic polypeptide

SEQ ID NO: 3069 - protein, 311 aa, Renilla reniformis; identical to SEQ ID NO: 2698

SEQ ID NO: 3070 - protein, 550 aa, Photinus pyralis; identical to SEQ ID NO: 2700

SEQ ID NO: 3071 - protein, 311 aa, Renilla reniformis; identical to SEQ ID NO: 2698

SEQ ID NO: 3072 - protein, 660 aa, synthetic construct; identical to SEQ ID NO: 2709
  REGION 1..660: note = Description of Artificial Sequence: Synthetic polypeptide

SEQ ID NO: 3073 - protein, 420 aa, synthetic construct; identical to SEQ ID NO: 2710
  REGION 1..420: note = Description of Artificial Sequence: Synthetic polypeptide

SEQ ID NO: 3074 - protein, 471 aa, synthetic construct; identical to SEQ ID NO: 2711
  REGION 1..471: note = Description of Artificial Sequence: Synthetic polypeptide

SEQ ID NO: 3075 - protein, 420 aa, synthetic construct; identical to SEQ ID NO: 2712
  REGION 1..420: note = Description of Artificial Sequence: Synthetic polypeptide

SEQ ID NO: 3076 - protein, 471 aa, synthetic construct; identical to SEQ ID NO: 2713
  REGION 1..471: note = Description of Artificial Sequence: Synthetic polypeptide

SEQ ID NO: 3077 - DNA, 1416 bp, synthetic construct; identical to SEQ ID NO: 2727
  misc_feature 1..1416: note = Description of Artificial Sequence: Synthetic Construct
  source 1..1416: mol_type = other DNA

SEQ ID NO: 3078 - protein, 5 aa, synthetic construct
  REGION 1..5: note = Description of Artificial Sequence: Synthetic peptide
GGSGG

SEQ ID NO: 3079 - protein, 12 aa, synthetic construct
  REGION 1..12: note = Description of Artificial Sequence: Synthetic peptide
ESRRVRRNKRSK

SEQ ID NO: 3080 - protein, 9 aa, synthetic construct
  REGION 1..9: note = Description of Artificial Sequence: Synthetic peptide
YPYDVPDYA

SEQ ID NO: 3081 - protein, 20 aa, synthetic construct
  REGION 1..20: note = Description of Artificial Sequence: Synthetic peptide
GATNFSLLKQAGDVEENPGP

SEQ ID NO: 3082 - protein, 13 aa, synthetic construct
  REGION 1..13: note = Description of Artificial Sequence: Synthetic peptide
QLIGMLQGLMRDL

SEQ ID NO: 3083 - protein, 12 aa, synthetic construct
  REGION 1..12: note = Description of Artificial Sequence: Synthetic peptide
ESRRVRRNKRSK

SEQ ID NO: 3084 - protein, 8 aa, synthetic construct
  REGION 1..8: note = Description of Artificial Sequence: Synthetic peptide
  MOD_RES 4: note = Any amino acid
DIEXNPGP

SEQ ID NO: 3085 - protein, 33 aa, synthetic construct
  REGION 1..33: note = Description of Artificial Sequence: Synthetic polypeptide
SGGGSGGGGSGGGGSGGGGSGGGGSGGGGSGGG

SEQ ID NO: 3086 - protein, 6 aa, synthetic construct
  REGION 1..6: note = Description of Artificial Sequence: Synthetic peptide
EFSTEF

SEQ ID NO: 3087 - protein, 34 aa, synthetic construct; identical to SEQ ID NO: 1924
  REGION 1..34: note = Description of Artificial Sequence: Synthetic polypeptide

SEQ ID NO: 3088 - protein, 20 aa, synthetic construct
  REGION 1..20: note = Description of Artificial Sequence: Synthetic peptide
SGGGSGGGGSGGGGSGGGGS

SEQ ID NO: 3089 - protein, 5 aa, synthetic construct
  REGION 1..5: note = Description of Artificial Sequence: Synthetic peptide
SGGGS

SEQ ID NO: 3090 - protein, 13 aa, synthetic construct
  REGION 1..13: note = Description of Artificial Sequence: Synthetic peptide
QLIGMLQGLMRDL

SEQ ID NO: 3091 - protein, 6 aa, synthetic construct
  REGION 1..6: note = Description of Artificial Sequence: Synthetic 6xHis tag
HHHHHH

SEQ ID NO: 3092 - protein, 4 aa, synthetic construct
  REGION 1..4: note = Description of Artificial Sequence: Synthetic peptide
ASFE

SEQ ID NO: 3093 - protein, 67 aa, Homo sapiens
VYKEAMNHPGHLKLFVTRIMQDFESDTFFPEIDLEKYKLLPEYPGVLSDVQEEKGIKYKFEVYEKND

SEQ ID NO: 3094 - protein, 67 aa, synthetic construct
  REGION 1..67: note = Description of Artificial Sequence: Synthetic polypeptide
VYKEAMNHPGHLKLFVTIIMQDFESDTFFPEIDLEKYKLLPEYPGVLSDVQEEKGIKYKFEVYEEND

SEQ ID NO: 3095 - DNA, 1335 bp, synthetic construct; identical to SEQ ID NO: 1798
  misc_feature 1..1335: note = Description of Artificial Sequence: Synthetic Promoter sequence
  source 1..1335: mol_type = other DNA

SEQ ID NO: 3096 - DNA, 399 bp, synthetic construct; identical to SEQ ID NO: 1797
  misc_feature 1..399: note = Description of Artificial Sequence: Synthetic Promoter sequence
  source 1..399: mol_type = other DNA

SEQ ID NO: 3097 - DNA, 1339 bp, synthetic construct; identical to SEQ ID NO: 1796
  misc_feature 1..1339: note = Description of Artificial Sequence: Synthetic Promoter sequence
  source 1..1339: mol_type = other DNA

SEQ ID NO: 3098 - DNA, 603 bp, synthetic construct; identical to SEQ ID NO: 1795
  misc_feature 1..603: note = Description of Artificial Sequence: Synthetic Promoter sequence
  source 1..603: mol_type = other DNA

SEQ ID NO: 3099 - DNA, 603 bp, synthetic construct; identical to SEQ ID NO: 1795
  misc_feature 1..603: note = Description of Artificial Sequence: Synthetic promoter
  source 1..603: mol_type = other DNA

SEQ ID NO: 3100 - DNA, 399 bp, synthetic construct; identical to SEQ ID NO: 1797
  misc_feature 1..399: note = Description of Artificial Sequence: Synthetic promoter
  source 1..399: mol_type = other DNA

SEQ ID NO: 3101 - DNA, 1339 bp, synthetic construct; identical to SEQ ID NO: 1796
  misc_feature 1..1339: note = Description of Artificial Sequence: Synthetic promoter
  source 1..1339: mol_type = other DNA

SEQ ID NO: 3102 - DNA, 1335 bp, synthetic construct; identical to SEQ ID NO: 1798
  misc_feature 1..1335: note = Description of Artificial Sequence: Synthetic promoter
  source 1..1335: mol_type = other DNA

SEQ ID NO: 3103 - protein, 158 aa, synthetic construct; identical to SEQ ID NO: 1174
  REGION 1..158: note = Description of Artificial Sequence: Synthetic destabilizing domain (DD)

SEQ ID NO: 3104 - protein, 239 aa, synthetic construct; identical to SEQ ID NO: 1181
  REGION 1..239: note = Description of Artificial Sequence: Synthetic polypeptide

SEQ ID NO: 3105 - DNA, 561 bp, synthetic construct; identical to SEQ ID NO: 90
  misc_feature 1..561: note = Description of Artificial Sequence: Synthetic Destabilizing Domain (DD)
  source 1..561: mol_type = other DNA

SEQ ID NO: 3106 - protein, 187 aa, Homo sapiens; identical to SEQ ID NO: 1

SEQ ID NO: 3107 - protein, 187 aa, synthetic construct; identical to SEQ ID NO: 2
  REGION 1..187: note = Description of Artificial Sequence: Synthetic destabilizing domain (DD)

SEQ ID NO: 3108 - protein, 187 aa, synthetic construct; identical to SEQ ID NO: 3
  REGION 1..187: note = Description of Artificial Sequence: Synthetic destabilizing domain (DD)

SEQ ID NO: 3109 - protein, 187 aa, synthetic construct; identical to SEQ ID NO: 4
  REGION 1..187: note = Description of Artificial Sequence: Synthetic destabilizing domain (DD)

SEQ ID NO: 3110 - protein, 187 aa, synthetic construct; identical to SEQ ID NO: 5
  REGION 1..187: note = Description of Artificial Sequence: Synthetic destabilizing domain (DD)

SEQ ID NO: 3111 - protein, 187 aa, synthetic construct; identical to SEQ ID NO: 6
  REGION 1..187: note = Description of Artificial Sequence: Synthetic destabilizing domain (DD)

SEQ ID NO: 3112 - protein, 187 aa, synthetic construct; identical to SEQ ID NO: 7
  REGION 1..187: note = Description of Artificial Sequence: Synthetic destabilizing domain (DD)

SEQ ID NO: 3113 - protein, 187 aa, synthetic construct; identical to SEQ ID NO: 8
  REGION 1..187: note = Description of Artificial Sequence: Synthetic destabilizing domain (DD)

SEQ ID NO: 3114 - protein, 187 aa, synthetic construct; identical to SEQ ID NO: 9
  REGION 1..187: note = Description of Artificial Sequence: Synthetic destabilizing domain (DD)

SEQ ID NO: 3115 - protein, 187 aa, synthetic construct; identical to SEQ ID NO: 10
  REGION 1..187: note = Description of Artificial Sequence: Synthetic Destabilizing Domain (DD)

SEQ ID NO: 3116 - protein, 187 aa, synthetic construct; identical to SEQ ID NO: 11
  REGION 1..187: note = Description of Artificial Sequence: Synthetic destabilizing domain (DD)

SEQ ID NO: 3117 - protein, 187 aa, synthetic construct; identical to SEQ ID NO: 12
  REGION 1..187: note = Description of Artificial Sequence: Synthetic destabilizing domain (DD)

SEQ ID NO: 3118 - protein, 186 aa, synthetic construct; identical to SEQ ID NO: 13
  REGION 1..186: note = Description of Artificial Sequence: Synthetic destabilizing domain (DD)

SEQ ID NO: 3119 - protein, 187 aa, synthetic construct; identical to SEQ ID NO: 14
  REGION 1..187: note = Description of Artificial Sequence: Synthetic destabilizing domain (DD)

SEQ ID NO: 3120 - protein, 187 aa, synthetic construct; identical to SEQ ID NO: 15
  REGION 1..187: note = Description of Artificial Sequence: Synthetic destabilizing domain (DD)

SEQ ID NO: 3121 - protein, 187 aa, synthetic construct; identical to SEQ ID NO: 16
  REGION 1..187: note = Description of Artificial Sequence: Synthetic destabilizing domain (DD)

SEQ ID NO: 3122 - protein, 187 aa, synthetic construct; identical to SEQ ID NO: 17
  REGION 1..187: note = Description of Artificial Sequence: Synthetic destabilizing domain (DD)

SEQ ID NO: 3123 - protein, 187 aa, synthetic construct; identical to SEQ ID NO: 18
  REGION 1..187: note = Description of Artificial Sequence: Synthetic destabilizing domain (DD)

SEQ ID NO: 3124 - protein, 187 aa, synthetic construct; identical to SEQ ID NO: 19
  REGION 1..187: note = Description of Artificial Sequence: Synthetic destabilizing domain (DD)

SEQ ID NO: 3125 - protein, 187 aa, synthetic construct; identical to SEQ ID NO: 20
  REGION 1..187: note = Description of Artificial Sequence: Synthetic destabilizing domain (DD)

SEQ ID NO: 3126 - protein, 187 aa, synthetic construct; identical to SEQ ID NO: 21
  REGION 1..187: note = Description of Artificial Sequence: Synthetic destabilizing domain (DD)

SEQ ID NO: 3127 - protein, 187 aa, synthetic construct; identical to SEQ ID NO: 22
  REGION 1..187: note = Description of Artificial Sequence: Synthetic destabilizing domain (DD)

SEQ ID NO: 3128 - protein, 187 aa, synthetic construct; identical to SEQ ID NO: 23
  REGION 1..187: note = Description of Artificial Sequence: Synthetic destabilizing domain (DD)

SEQ ID NO: 3129 - protein, 187 aa, synthetic construct; identical to SEQ ID NO: 24
  REGION 1..187: note = Description of Artificial Sequence: Synthetic destabilizing domain (DD)

SEQ ID NO: 3130 - protein, 187 aa, synthetic construct; identical to SEQ ID NO: 25
  REGION 1..187: note = Description of Artificial Sequence: Synthetic destabilizing domain (DD)

SEQ ID NO: 3131 - protein, 187 aa, synthetic construct; identical to SEQ ID NO: 26
  REGION 1..187: note = Description of Artificial Sequence: Synthetic destabilizing domain (DD)

SEQ ID NO: 3132 - protein, 187 aa, synthetic construct; identical to SEQ ID NO: 27
  REGION 1..187: note = Description of Artificial Sequence: Synthetic destabilizing domain (DD)

SEQ ID NO: 3133 - protein, 187 aa, synthetic construct; identical to SEQ ID NO: 28
  REGION 1..187: note = Description of Artificial Sequence: Synthetic destabilizing domain (DD)

SEQ ID NO: 3134 - protein, 187 aa, synthetic construct; identical to SEQ ID NO: 29
  REGION 1..187: note = Description of Artificial Sequence: Synthetic destabilizing domain (DD)

SEQ ID NO: 3135 - protein, 187 aa, synthetic construct; identical to SEQ ID NO: 30
  REGION 1..187: note = Description of Artificial Sequence: Synthetic destabilizing domain (DD)

SEQ ID NO: 3136 - protein, 187 aa, synthetic construct; identical to SEQ ID NO: 31
  REGION 1..187: note = Description of Artificial Sequence: Synthetic destabilizing domain (DD)

SEQ ID NO: 3137 - protein, 186 aa, synthetic construct; identical to SEQ ID NO: 32
  REGION 1..186: note = Description of Artificial Sequence: Synthetic destabilizing domain (DD)

SEQ ID NO: 3138 - protein, 186 aa, synthetic construct; identical to SEQ ID NO: 33
  REGION 1..186: note = Description of Artificial Sequence: Synthetic destabilizing domain (DD)

SEQ ID NO: 3139 - protein, 186 aa, synthetic construct; identical to SEQ ID NO: 34
  REGION 1..186: note = Description of Artificial Sequence: Synthetic destabilizing domain (DD)

SEQ ID NO: 3140 - protein, 186 aa, synthetic construct; identical to SEQ ID NO: 35
  REGION 1..186: note = Description of Artificial Sequence: Synthetic destabilizing domain (DD)

SEQ ID NO: 3141 - protein, 186 aa, synthetic construct; identical to SEQ ID NO: 35
  REGION 1..186: note = Description of Artificial Sequence: Synthetic destabilizing domain (DD)

SEQ ID NO: 3142 - protein, 186 aa, synthetic construct; identical to SEQ ID NO: 37
  REGION 1..186: note = Description of Artificial Sequence: Synthetic destabilizing domain (DD)

SEQ ID NO: 3143 - protein, 186 aa, synthetic construct; identical to SEQ ID NO: 38
  REGION 1..186: note = Description of Artificial Sequence: Synthetic destabilizing domain (DD)

SEQ ID NO: 3144 - protein, 186 aa, synthetic construct; identical to SEQ ID NO: 39
  REGION 1..186: note = Description of Artificial Sequence: Synthetic destabilizing domain (DD)

SEQ ID NO: 3145 - protein, 186 aa, synthetic construct; identical to SEQ ID NO: 40
  REGION 1..186: note = Description of Artificial Sequence: Synthetic destabilizing domain (DD)

SEQ ID NO: 3146 - protein, 186 aa, synthetic construct; identical to SEQ ID NO: 41
  REGION 1..186: note = Description of Artificial Sequence: Synthetic destabilizing domain (DD)

SEQ ID NO: 3147 - protein, 186 aa, synthetic construct; identical to SEQ ID NO: 42
  REGION 1..186: note = Description of Artificial Sequence: Synthetic destabilizing domain (DD)

SEQ ID NO: 3148 - protein, 187 aa, synthetic construct; identical to SEQ ID NO: 43
  REGION 1..187: note = Description of Artificial Sequence: Synthetic destabilizing domain (DD)

SEQ ID NO: 3149 - protein, 187 aa, synthetic construct; identical to SEQ ID NO: 44
  REGION 1..187: note = Description of Artificial Sequence: Synthetic destabilizing domain (DD)

SEQ ID NO: 3150 - protein, 187 aa, synthetic construct; identical to SEQ ID NO: 45
  REGION 1..187: note = Description of Artificial Sequence: Synthetic destabilizing domain (DD)

SEQ ID NO: 3151 - protein, 187 aa, synthetic construct; identical to SEQ ID NO: 46
  REGION 1..187: note = Description of Artificial Sequence: Synthetic destabilizing domain (DD)

SEQ ID NO: 3152 - protein, 187 aa, synthetic construct; identical to SEQ ID NO: 47
  REGION 1..187: note = Description of Artificial Sequence: Synthetic destabilizing domain (DD)

SEQ ID NO: 3153 - protein, 187 aa, synthetic construct; identical to SEQ ID NO: 48
  REGION 1..187: note = Description of Artificial Sequence: Synthetic destabilizing domain (DD)

SEQ ID NO: 3154 - protein, 187 aa, synthetic construct; identical to SEQ ID NO: 49
  REGION 1..187: note = Description of Artificial Sequence: Synthetic destabilizing domain (DD)

SEQ ID NO: 3155 - protein, 187 aa, synthetic construct; identical to SEQ ID NO: 50
  REGION 1..187: note = Description of Artificial Sequence: Synthetic destabilizing domain (DD)

SEQ ID NO: 3156 - protein, 187 aa, synthetic construct; identical to SEQ ID NO: 51
  REGION 1..187: note = Description of Artificial Sequence: Synthetic destabilizing domain (DD)

SEQ ID NO: 3157 - protein, 187 aa, synthetic construct; identical to SEQ ID NO: 52
  REGION 1..187: note = Description of Artificial Sequence: Synthetic destabilizing domain (DD)

SEQ ID NO: 3158 - protein, 187 aa, synthetic construct; identical to SEQ ID NO: 53
  REGION 1..187: note = Description of Artificial Sequence: Synthetic destabilizing domain (DD)

SEQ ID NO: 3159 - protein, 187 aa, synthetic construct; identical to SEQ ID NO: 54
  REGION 1..187: note = Description of Artificial Sequence: Synthetic destabilizing domain (DD)

SEQ ID NO: 3160 - protein, 186 aa, synthetic construct; identical to SEQ ID NO: 55
  REGION 1..186: note = Description of Artificial Sequence: Synthetic destabilizing domain (DD)

SEQ ID NO: 3161 - protein, 186 aa, synthetic construct; identical to SEQ ID NO: 56
  REGION 1..186: note = Description of Artificial Sequence: Synthetic destabilizing domain (DD)

SEQ ID NO: 3162 - protein, 186 aa, synthetic construct; identical to SEQ ID NO: 57
  REGION 1..186: note = Description of Artificial Sequence: Synthetic destabilizing domain (DD)

SEQ ID NO: 3163 - protein, 186 aa, synthetic construct; identical to SEQ ID NO: 1196
  REGION 1..186: note = Description of Artificial Sequence: Synthetic destabilizing domain (DD)

SEQ ID NO: 3164 - protein, 187 aa, synthetic construct; identical to SEQ ID NO: 59
  REGION 1..187: note = Description of Artificial Sequence: Synthetic destabilizing domain (DD)

SEQ ID NO: 3165 - protein, 187 aa, synthetic construct; identical to SEQ ID NO: 60
  REGION 1..187: note = Description of Artificial Sequence: Synthetic destabilizing domain (DD)

SEQ ID NO: 3166 - protein, 186 aa, synthetic construct; identical to SEQ ID NO: 61
  REGION 1..186: note = Description of Artificial Sequence: Synthetic destabilizing domain (DD)

SEQ ID NO: 3167 - protein, 187 aa, synthetic construct; identical to SEQ ID NO: 62
  REGION 1..187: note = Description of Artificial Sequence: Synthetic destabilizing domain (DD)

SEQ ID NO: 3168 - protein, 187 aa, synthetic construct; identical to SEQ ID NO: 63
  REGION 1..187: note = Description of Artificial Sequence: Synthetic destabilizing domain (DD)

SEQ ID NO: 3169 - protein, 187 aa, synthetic construct; identical to SEQ ID NO: 64
  REGION 1..187: note = Description of Artificial Sequence: Synthetic destabilizing domain (DD)

SEQ ID NO: 3170 - protein, 187 aa, synthetic construct; identical to SEQ ID NO: 65
  REGION 1..187: note = Description of Artificial Sequence: Synthetic destabilizing domain (DD)

SEQ ID NO: 3171 - protein, 187 aa, synthetic construct; identical to SEQ ID NO: 66
  REGION 1..187: note = Description of Artificial Sequence: Synthetic destabilizing domain (DD)

SEQ ID NO: 3172 - protein, 187 aa, synthetic construct; identical to SEQ ID NO: 67
  REGION 1..187: note = Description of Artificial Sequence: Synthetic destabilizing domain (DD)

SEQ ID NO: 3173 - protein, 187 aa, synthetic construct; identical to SEQ ID NO: 68
  REGION 1..187: note = Description of Artificial Sequence: Synthetic destabilizing domain (DD)

SEQ ID NO: 3174 - protein, 187 aa, synthetic construct; identical to SEQ ID NO: 69
  REGION 1..187: note = Description of Artificial Sequence: Synthetic destabilizing domain (DD)

SEQ ID NO: 3175 - protein, 187 aa, synthetic construct; identical to SEQ ID NO: 70
  REGION 1..187: note = Description of Artificial Sequence: Synthetic destabilizing domain (DD)

SEQ ID NO: 3176 - protein, 186 aa, synthetic construct; identical to SEQ ID NO: 71
  REGION 1..186: note = Description of Artificial Sequence: Synthetic destabilizing domain (DD)

SEQ ID NO: 3177 - DNA, 561 bp, synthetic construct; identical to SEQ ID NO: 72
  misc_feature 1..561: note = Description of Artificial Sequence: Synthetic destabilizing domain (DD)
  source 1..561: mol_type = other DNA

SEQ ID NO: 3178 - DNA, 561 bp, synthetic construct; identical to SEQ ID NO: 73
  misc_feature 1..561: note = Description of Artificial Sequence: Synthetic destabilizing domain (DD)
  source 1..561: mol_type = other DNA

SEQ ID NO: 3179 - DNA, 561 bp, synthetic construct; identical to SEQ ID NO: 74
  misc_feature 1..561: note = Description of Artificial Sequence: Synthetic destabilizing domain (DD)
  source 1..561: mol_type = other DNA

SEQ ID NO: 3180 - DNA, 561 bp, synthetic construct; identical to SEQ ID NO: 75
  misc_feature 1..561: note = Description of Artificial Sequence: Synthetic destabilizing domain (DD)
  source 1..561: mol_type = other DNA

SEQ ID NO: 3181 - DNA, 561 bp, synthetic construct; identical to SEQ ID NO: 76
  misc_feature 1..561: note = Description of Artificial Sequence: Synthetic destabilizing domain (DD)
  source 1..561: mol_type = other DNA

SEQ ID NO: 3182 - DNA, 561 bp, synthetic construct; identical to SEQ ID NO: 77
  misc_feature 1..561: note = Description of Artificial Sequence: Synthetic destabilizing domain (DD)
  source 1..561: mol_type = other DNA

SEQ ID NO: 3183 - DNA, 561 bp, synthetic construct; identical to SEQ ID NO: 78
  misc_feature 1..561: note = Description of Artificial Sequence: Synthetic destabilizing domain (DD)
  source 1..561: mol_type = other DNA

SEQ ID NO: 3184 - DNA, 561 bp, synthetic construct; identical to SEQ ID NO: 79
  misc_feature 1..561: note = Description of Artificial Sequence: Synthetic destabilizing domain (DD)
  source 1..561: mol_type = other DNA

SEQ ID NO: 3185 - DNA, 561 bp, synthetic construct; identical to SEQ ID NO: 80
  misc_feature 1..561: note = Description of Artificial Sequence: Synthetic destabilizing domain (DD)
  source 1..561: mol_type = other DNA

SEQ ID NO: 3186 - DNA, 561 bp, synthetic construct; identical to SEQ ID NO: 81
  misc_feature 1..561: note = Description of Artificial Sequence: Synthetic destabilizing domain (DD)
  source 1..561: mol_type = other DNA

SEQ ID NO: 3187 - DNA, 561 bp, synthetic construct; identical to SEQ ID NO: 82
  misc_feature 1..561: note = Description of Artificial Sequence: Synthetic destabilizing domain (DD)
  source 1..561: mol_type = other DNA

SEQ ID NO: 3188 - DNA, 561 bp, synthetic construct; identical to SEQ ID NO: 83
  misc_feature 1..561: note = Description of Artificial Sequence: Synthetic destabilizing domain (DD)
  source 1..561: mol_type = other DNA

SEQ ID NO: 3189 - DNA, 561 bp, synthetic construct; identical to SEQ ID NO: 84
  misc_feature 1..561: note = Description of Artificial Sequence: Synthetic destabilizing domain (DD)
  source 1..561: mol_type = other DNA

SEQ ID NO: 3190 - DNA, 561 bp, synthetic construct; identical to SEQ ID NO: 85
  misc_feature 1..561: note = Description of Artificial Sequence: Synthetic destabilizing domain (DD)
  source 1..561: mol_type = other DNA

SEQ ID NO: 3191 - DNA, 558 bp, synthetic construct; identical to SEQ ID NO: 86
  misc_feature 1..558: note = Description of Artificial Sequence: Synthetic destabilizing domain (DD)
  source 1..558: mol_type = other DNA

SEQ ID NO: 3192 - DNA, 558 bp, synthetic construct; identical to SEQ ID NO: 87
  misc_feature 1..558: note = Description of Artificial Sequence: Synthetic destabilizing domain (DD)
  source 1..558: mol_type = other DNA

SEQ ID NO: 3193 - DNA, 558 bp, synthetic construct; identical to SEQ ID NO: 88
  misc_feature 1..558: note = Description of Artificial Sequence: Synthetic destabilizing domain (DD)
  source 1..558: mol_type = other DNA

SEQ ID NO: 3194 - DNA, 558 bp, synthetic construct; identical to SEQ ID NO: 89
  misc_feature 1..558: note = Description of Artificial Sequence: Synthetic destabilizing domain (DD)
  source 1..558: mol_type = other DNA

SEQ ID NO: 3195 - DNA, 561 bp, synthetic construct; identical to SEQ ID NO: 90
  misc_feature 1..561: note = Description of Artificial Sequence: Synthetic destabilizing domain (DD)
  source 1..561: mol_type = other DNA

SEQ ID NO: 3196 - DNA, 561 bp, synthetic construct; identical to SEQ ID NO: 92
  misc_feature 1..561: note = Description of Artificial Sequence: Synthetic Destabilizing Domain (DD)
  source 1..561: mol_type = other DNA

SEQ ID NO: 3197 - DNA, 561 bp, synthetic construct; identical to SEQ ID NO: 93
  misc_feature 1..561: note = Description of Artificial Sequence: Synthetic Destabilizing Domain (DD)
  source 1..561: mol_type = other DNA

SEQ ID NO: 3198 - DNA, 561 bp, synthetic construct; identical to SEQ ID NO: 94
  misc_feature 1..561: note = Description of Artificial Sequence: Synthetic Destabilizing Domain (DD)
  source 1..561: mol_type = other DNA

SEQ ID NO: 3199 - DNA, 561 bp, synthetic construct; identical to SEQ ID NO: 95
  misc_feature 1..561: note = Description of Artificial Sequence: Synthetic Destabilizing Domain (DD)
  source 1..561: mol_type = other DNA

SEQ ID NO: 3200 - DNA, 561 bp, synthetic construct; identical to SEQ ID NO: 96
  misc_feature 1..561: note = Description of Artificial Sequence: Synthetic Destabilizing Domain (DD)
  source 1..561: mol_type = other DNA

SEQ ID NO: 3201 - DNA, 561 bp, synthetic construct; identical to SEQ ID NO: 97
  misc_feature 1..561: note = Description of Artificial Sequence: Synthetic Destabilizing Domain (DD)
  source 1..561: mol_type = other DNA

SEQ ID NO: 3202 - DNA, 561 bp, synthetic construct; identical to SEQ ID NO: 98
  misc_feature 1..561: note = Description of Artificial Sequence: Synthetic Destabilizing Domain (DD)
  source 1..561: mol_type = other DNA

SEQ ID NO: 3203 - DNA, 561 bp, synthetic construct; identical to SEQ ID NO: 99
  misc_feature 1..561: note = Description of Artificial Sequence: Synthetic Destabilizing Domain (DD)
  source 1..561: mol_type = other DNA

SEQ ID NO: 3204 - DNA, 561 bp, synthetic construct; identical to SEQ ID NO: 100
  misc_feature 1..561: note = Description of Artificial Sequence: Synthetic Destabilizing Domain (DD)
  source 1..561: mol_type = other DNA

SEQ ID NO: 3205 - DNA, 561 bp, synthetic construct; identical to SEQ ID NO: 101
  misc_feature 1..561: note = Description of Artificial Sequence: Synthetic Destabilizing Domain (DD)
  source 1..561: mol_type = other DNA

SEQ ID NO: 3206 - DNA, 561 bp, synthetic construct; identical to SEQ ID NO: 102
  misc_feature 1..561: note = Description of Artificial Sequence: Synthetic Destabilizing Domain (DD)
  source 1..561: mol_type = other DNA

SEQ ID NO: 3207 - DNA, 561 bp, synthetic construct; identical to SEQ ID NO: 103
  misc_feature 1..561: note = Description of Artificial Sequence: Synthetic Destabilizing Domain (DD)
  source 1..561: mol_type = other DNA

SEQ ID NO: 3208 - DNA, 561 bp, synthetic construct; identical to SEQ ID NO: 104
  misc_feature 1..561: note = Description of Artificial Sequence: Synthetic Destabilizing Domain (DD)
  source 1..561: mol_type = other DNA

SEQ ID NO: 3209 - DNA, 561 bp, synthetic construct; identical to SEQ ID NO: 105
  misc_feature 1..561: note = Description of Artificial Sequence: Synthetic Destabilizing Domain (DD)
  source 1..561: mol_type = other DNA

SEQ ID NO: 3210 - DNA, 561 bp, synthetic construct; identical to SEQ ID NO: 106
  misc_feature 1..561: note = Description of Artificial Sequence: Synthetic Destabilizing Domain (DD)
  source 1..561: mol_type = other DNA

SEQ ID NO: 3211 - DNA, 561 bp, synthetic construct; identical to SEQ ID NO: 107
  misc_feature 1..561: note = Description of Artificial Sequence: Synthetic Destabilizing Domain (DD)
  source 1..561: mol_type = other DNA

SEQ ID NO: 3212 - DNA, 561 bp, synthetic construct; identical to SEQ ID NO: 108
  misc_feature 1..561: note = Description of Artificial Sequence: Synthetic Destabilizing Domain (DD)
  source 1..561: mol_type = other DNA

SEQ ID NO: 3213 - DNA, 561 bp, synthetic construct; identical to SEQ ID NO: 109
  misc_feature 1..561: note = Description of Artificial Sequence: Synthetic Destabilizing Domain (DD)
  source 1..561: mol_type = other DNA

SEQ ID NO: 3214 - DNA, 561 bp, synthetic construct; identical to SEQ ID NO: 110
  misc_feature 1..561: note = Description of Artificial Sequence: Synthetic Destabilizing Domain (DD)
  source 1..561: mol_type = other DNA

SEQ ID NO: 3215 - DNA, 561 bp, synthetic construct; identical to SEQ ID NO: 111
  misc_feature 1..561: note = Description of Artificial Sequence: Synthetic Destabilizing Domain (DD)
  source 1..561: mol_type = other DNA

SEQ ID NO: 3216 - DNA, 561 bp, synthetic construct; identical to SEQ ID NO: 112
  misc_feature 1..561: note = Description of Artificial Sequence: Synthetic Destabilizing Domain (DD)
  source 1..561: mol_type = other DNA

SEQ ID NO: 3217 - DNA, 561 bp, synthetic construct; identical to SEQ ID NO: 113
  misc_feature 1..561: note = Description of Artificial Sequence: Synthetic Destabilizing Domain (DD)
  source 1..561: mol_type = other DNA

SEQ ID NO: 3218 - DNA, 561 bp, synthetic construct; identical to SEQ ID NO: 114
  misc_feature 1..561: note = Description of Artificial Sequence: Synthetic Destabilizing Domain (DD)
  source 1..561: mol_type = other DNA

SEQ ID NO: 3219 - DNA, 561 bp, synthetic construct; identical to SEQ ID NO: 115
  misc_feature 1..561: note = Description of Artificial Sequence: Synthetic Destabilizing Domain (DD)
  source 1..561: mol_type = other DNA

SEQ ID NO: 3220 - DNA, 561 bp, synthetic construct; identical to SEQ ID NO: 116
  misc_feature 1..561: note = Description of Artificial Sequence: Synthetic Destabilizing Domain (DD)
  source 1..561: mol_type = other DNA

SEQ ID NO: 3221 - DNA, 561 bp, synthetic construct; identical to SEQ ID NO: 117
  misc_feature 1..561: note = Description of Artificial Sequence: Synthetic Destabilizing Domain (DD)
  source 1..561: mol_type = other DNA

SEQ ID NO: 3222 - DNA, 561 bp, synthetic construct; identical to SEQ ID NO: 118
  misc_feature 1..561: note = Description of Artificial Sequence: Synthetic Destabilizing Domain (DD)
  source 1..561: mol_type = other DNA

SEQ ID NO: 3223 - DNA, 561 bp, synthetic construct; identical to SEQ ID NO: 119
  misc_feature 1..561: note = Description of Artificial Sequence: Synthetic Destabilizing Domain (DD)
  source 1..561: mol_type = other DNA

SEQ ID NO: 3224 - DNA, 561 bp, synthetic construct; identical to SEQ ID NO: 120
  misc_feature 1..561: note = Description of Artificial Sequence: Synthetic Destabilizing Domain (DD)
  source 1..561: mol_type = other DNA

SEQ ID NO: 3225 - DNA, 561 bp, synthetic construct; identical to SEQ ID NO: 121
  misc_feature 1..561: note = Description of Artificial Sequence: Synthetic Destabilizing Domain (DD)
  source 1..561: mol_type = other DNA

SEQ ID NO: 3226 - DNA, 561 bp, synthetic construct; identical to SEQ ID NO: 122
  misc_feature 1..561: note = Description of Artificial Sequence: Synthetic Destabilizing Domain (DD)
  source 1..561: mol_type = other DNA

SEQ ID NO: 3227 - DNA, 561 bp, synthetic construct; identical to SEQ ID NO: 123
  misc_feature 1..561: note = Description of Artificial Sequence: Synthetic Destabilizing Domain (DD)
  source 1..561: mol_type = other DNA

SEQ ID NO: 3228 - DNA, 561 bp, synthetic construct; identical to SEQ ID NO: 124
  misc_feature 1..561: note = Description of Artificial Sequence: Synthetic Destabilizing Domain (DD)
  source 1..561: mol_type = other DNA

SEQ ID NO: 3229 - DNA, 561 bp, synthetic construct; identical to SEQ ID NO: 91
  misc_feature 1..561: note = Description of Artificial Sequence: Synthetic destabilizing domain (DD)
  source 1..561: mol_type = other DNA

SEQ ID NO: 3230 - DNA, 561 bp, synthetic construct; identical to SEQ ID NO: 92
  misc_feature 1..561: note = Description of Artificial Sequence: Synthetic destabilizing domain (DD)
  source 1..561: mol_type = other DNA

SEQ ID NO: 3231 - DNA, 561 bp, synthetic construct; identical to SEQ ID NO: 93
  misc_feature 1..561: note = Description of Artificial Sequence: Synthetic destabilizing domain (DD)
  source 1..561: mol_type = other DNA

SEQ ID NO: 3232 - DNA, 561 bp, synthetic construct; identical to SEQ ID NO: 94
  misc_feature 1..561: note = Description of Artificial Sequence: Synthetic destabilizing domain (DD)
  source 1..561: mol_type = other DNA

SEQ ID NO: 3233 - DNA, 561 bp, synthetic construct; identical to SEQ ID NO: 95
  misc_feature 1..561: note = Description of Artificial Sequence: Synthetic destabilizing domain (DD)
  source 1..561: mol_type = other DNA

SEQ ID NO: 3234 - DNA, 561 bp, synthetic construct; identical to SEQ ID NO: 96
  misc_feature 1..561: note = Description of Artificial Sequence: Synthetic destabilizing domain (DD)
  source 1..561: mol_type = other DNA

SEQ ID NO: 3235 - DNA, 561 bp, synthetic construct; identical to SEQ ID NO: 97
  misc_feature 1..561: note = Description of Artificial Sequence: Synthetic destabilizing domain (DD)
  source 1..561: mol_type = other DNA

SEQ ID NO: 3236 - DNA, 561 bp, synthetic construct; identical to SEQ ID NO: 98
  misc_feature 1..561: note = Description of Artificial Sequence: Synthetic destabilizing domain (DD)
  source 1..561: mol_type = other DNA

SEQ ID NO: 3237 - DNA, 561 bp, synthetic construct; identical to SEQ ID NO: 99
  misc_feature 1..561: note = Description of Artificial Sequence: Synthetic destabilizing domain (DD)
  source 1..561: mol_type = other DNA

SEQ ID NO: 3238 - DNA, 561 bp, synthetic construct; identical to SEQ ID NO: 100
  misc_feature 1..561: note = Description of Artificial Sequence: Synthetic destabilizing domain (DD)
  source 1..561: mol_type = other DNA

SEQ ID NO: 3239 - DNA, 561 bp, synthetic construct; identical to SEQ ID NO: 101
  misc_feature 1..561: note = Description of Artificial Sequence: Synthetic destabilizing domain (DD)
  source 1..561: mol_type = other DNA

SEQ ID NO: 3240 - DNA, 561 bp, synthetic construct; identical to SEQ ID NO: 102
  misc_feature 1..561: note = Description of Artificial Sequence: Synthetic destabilizing domain (DD)
  source 1..561: mol_type = other DNA

SEQ ID NO: 3241 - DNA, 561 bp, synthetic construct; identical to SEQ ID NO: 103
  misc_feature 1..561: note = Description of Artificial Sequence: Synthetic destabilizing domain (DD)
  source 1..561: mol_type = other DNA

SEQ ID NO: 3242 - DNA, 561 bp, synthetic construct; identical to SEQ ID NO: 104
  misc_feature 1..561: note = Description of Artificial Sequence: Synthetic destabilizing domain (DD)
  source 1..561: mol_type = other DNA

SEQ ID NO: 3243 - DNA, 561 bp, synthetic construct; identical to SEQ ID NO: 105
  misc_feature 1..561: note = Description of Artificial Sequence: Synthetic destabilizing domain (DD)
  source 1..561: mol_type = other DNA

SEQ ID NO: 3244 - DNA, 561 bp, synthetic construct; identical to SEQ ID NO: 106
  misc_feature 1..561: note = Description of Artificial Sequence: Synthetic destabilizing domain (DD)
  source 1..561: mol_type = other DNA

SEQ ID NO: 3245 - DNA, 561 bp, synthetic construct; identical to SEQ ID NO: 107
  misc_feature 1..561: note = Description of Artificial Sequence: Synthetic destabilizing domain (DD)
  source 1..561: mol_type = other DNA

SEQ ID NO: 3246 - protein, 187 aa, synthetic construct; identical to SEQ ID NO: 2
  REGION 1..187: note = Description of Artificial Sequence: Synthetic destabilizing domain (DD)

SEQ ID NO: 3247 - protein, 187 aa, synthetic construct; identical to SEQ ID NO: 3
  REGION 1..187: note = Description of Artificial Sequence: Synthetic destabilizing domain (DD)

SEQ ID NO: 3248 - protein, 187 aa, synthetic construct; identical to SEQ ID NO: 4
  REGION 1..187: note = Description of Artificial Sequence: Synthetic destabilizing domain (DD)

SEQ ID NO: 3249 - protein, 187 aa, synthetic construct; identical to SEQ ID NO: 5
  REGION 1..187: note = Description of Artificial Sequence: Synthetic destabilizing domain (DD)

SEQ ID NO: 3250 - protein, 187 aa, synthetic construct; identical to SEQ ID NO: 6
  REGION 1..187: note = Description of Artificial Sequence: Synthetic destabilizing domain (DD)

SEQ ID NO: 3251 - protein, 187 aa, synthetic construct; identical to SEQ ID NO: 7
  REGION 1..187: note = Description of Artificial Sequence: Synthetic destabilizing domain (DD)

SEQ ID NO: 3252 - protein, 187 aa, synthetic construct; identical to SEQ ID NO: 8
  REGION 1..187: note = Description of Artificial Sequence: Synthetic destabilizing domain (DD)

SEQ ID NO: 3253 - protein, 187 aa, synthetic construct; identical to SEQ ID NO: 9
  REGION 1..187: note = Description of Artificial Sequence: Synthetic destabilizing domain (DD)

SEQ ID NO: 3254 - protein, 187 aa, synthetic construct; identical to SEQ ID NO: 10
  REGION 1..187: note = Description of Artificial Sequence: Synthetic Destabilizing Domain (DD)

SEQ ID NO: 3255 - protein, 187 aa, synthetic construct; identical to SEQ ID NO: 11
  REGION 1..187: note = Description of Artificial Sequence: Synthetic destabilizing domain (DD)

SEQ ID NO: 3256 - protein, 187 aa, synthetic construct; identical to SEQ ID NO: 12
  REGION 1..187: note = Description of Artificial Sequence: Synthetic destabilizing domain (DD)

SEQ ID NO: 3257 - protein, 186 aa, synthetic construct; identical to SEQ ID NO: 13
  REGION 1..186: note = Description of Artificial Sequence: Synthetic destabilizing domain (DD)

SEQ ID NO: 3258 - protein, 187 aa, synthetic construct; identical to SEQ ID NO: 14
  REGION 1..187: note = Description of Artificial Sequence: Synthetic destabilizing domain (DD)

SEQ ID NO: 3259 - protein, 187 aa, synthetic construct; identical to SEQ ID NO: 15
  REGION 1..187: note = Description of Artificial Sequence: Synthetic destabilizing domain (DD)

SEQ ID NO: 3260 - protein, 187 aa, synthetic construct; identical to SEQ ID NO: 16
  REGION 1..187: note = Description of Artificial Sequence: Synthetic destabilizing domain (DD)

SEQ ID NO: 3261 - protein, 187 aa, synthetic construct; identical to SEQ ID NO: 17
  REGION 1..187: note = Description of Artificial Sequence: Synthetic destabilizing domain (DD)

SEQ ID NO: 3262 - protein, 187 aa, synthetic construct; identical to SEQ ID NO: 18
  REGION 1..187: note = Description of Artificial Sequence: Synthetic destabilizing domain (DD)

SEQ ID NO: 3263 - protein, 187 aa, synthetic construct; identical to SEQ ID NO: 19
  REGION 1..187: note = Description of Artificial Sequence: Synthetic destabilizing domain (DD)

SEQ ID NO: 3264 - protein, 187 aa, synthetic construct; identical to SEQ ID NO: 20
  REGION 1..187: note = Description of Artificial Sequence: Synthetic destabilizing domain (DD)

SEQ ID NO: 3265 - protein, 187 aa, synthetic construct; identical to SEQ ID NO: 21
  REGION 1..187: note = Description of Artificial Sequence: Synthetic destabilizing domain (DD)

SEQ ID NO: 3266 - protein, 187 aa, synthetic construct; identical to SEQ ID NO: 22
  REGION 1..187: note = Description of Artificial Sequence: Synthetic destabilizing domain (DD)

SEQ ID NO: 3267 - protein, 187 aa, synthetic construct; identical to SEQ ID NO: 23
  REGION 1..187: note = Description of Artificial Sequence: Synthetic destabilizing domain (DD)

SEQ ID NO: 3268 - protein, 187 aa, synthetic construct; identical to SEQ ID NO: 24
  REGION 1..187: note = Description of Artificial Sequence: Synthetic destabilizing domain (DD)

SEQ ID NO: 3269 - protein, 187 aa, synthetic construct; identical to SEQ ID NO: 25
  REGION 1..187: note = Description of Artificial Sequence: Synthetic destabilizing domain (DD)

SEQ ID NO: 3270 - protein, 187 aa, synthetic construct; identical to SEQ ID NO: 26
  REGION 1..187: note = Description of Artificial Sequence: Synthetic destabilizing domain (DD)

SEQ ID NO: 3271 - protein, 187 aa, synthetic construct; identical to SEQ ID NO: 27
  REGION 1..187: note = Description of Artificial Sequence: Synthetic destabilizing domain (DD)

SEQ ID NO: 3272 - protein, 187 aa, synthetic construct; identical to SEQ ID NO: 28
  REGION 1..187: note = Description of Artificial Sequence: Synthetic destabilizing domain (DD)

SEQ ID NO: 3273 - protein, 187 aa, synthetic construct; identical to SEQ ID NO: 29
  REGION 1..187: note = Description of Artificial Sequence: Synthetic destabilizing domain (DD)

SEQ ID NO: 3274 - protein, 187 aa, synthetic construct; identical to SEQ ID NO: 30
  REGION 1..187: note = Description of Artificial Sequence: Synthetic destabilizing domain (DD)

SEQ ID NO: 3275 - protein, 187 aa, synthetic construct; identical to SEQ ID NO: 31
  REGION 1..187: note = Description of Artificial Sequence: Synthetic destabilizing domain (DD)

SEQ ID NO: 3276 - protein, 186 aa, synthetic construct; identical to SEQ ID NO: 32
  REGION 1..186: note = Description of Artificial Sequence: Synthetic destabilizing domain (DD)

SEQ ID NO: 3277 - protein, 186 aa, synthetic construct; identical to SEQ ID NO: 33
  REGION 1..186: note = Description of Artificial Sequence: Synthetic destabilizing domain (DD)

SEQ ID NO: 3278 - protein, 186 aa, synthetic construct; identical to SEQ ID NO: 34
  REGION 1..186: note = Description of Artificial Sequence: Synthetic destabilizing domain (DD)

SEQ ID NO: 3279 - protein, 186 aa, synthetic construct; identical to SEQ ID NO: 35
  REGION 1..186: note = Description of Artificial Sequence: Synthetic destabilizing domain (DD)

SEQ ID NO: 3280 - protein, 186 aa, synthetic construct; identical to SEQ ID NO: 35
  REGION 1..186: note = Description of Artificial Sequence: Synthetic destabilizing domain (DD)

SEQ ID NO: 3281 - protein, 186 aa, synthetic construct; identical to SEQ ID NO: 37
  REGION 1..186: note = Description of Artificial Sequence: Synthetic destabilizing domain (DD)

SEQ ID NO: 3282 - protein, 186 aa, synthetic construct; identical to SEQ ID NO: 38
  REGION 1..186: note = Description of Artificial Sequence: Synthetic destabilizing domain (DD)

SEQ ID NO: 3283 - protein, 186 aa, synthetic construct; identical to SEQ ID NO: 39
  REGION 1..186: note = Description of Artificial Sequence: Synthetic destabilizing domain (DD)

SEQ ID NO: 3284 - protein, 186 aa, synthetic construct; identical to SEQ ID NO: 40
  REGION 1..186: note = Description of Artificial Sequence: Synthetic destabilizing domain (DD)

SEQ ID NO: 3285 - protein, 186 aa, synthetic construct; identical to SEQ ID NO: 41
  REGION 1..186: note = Description of Artificial Sequence: Synthetic destabilizing domain (DD)

SEQ ID NO: 3286 - protein, 186 aa, synthetic construct; identical to SEQ ID NO: 42
  REGION 1..186: note = Description of Artificial Sequence: Synthetic destabilizing domain (DD)

SEQ ID NO: 3287 - protein, 187 aa, synthetic construct; identical to SEQ ID NO: 43
  REGION 1..187: note = Description of Artificial Sequence: Synthetic destabilizing domain (DD)

SEQ ID NO: 3288 - protein, 187 aa, synthetic construct; identical to SEQ ID NO: 44
  REGION 1..187: note = Description of Artificial Sequence: Synthetic destabilizing domain (DD)

SEQ ID NO: 3289 - protein, 187 aa, synthetic construct; identical to SEQ ID NO: 45
  REGION 1..187: note = Description of Artificial Sequence: Synthetic destabilizing domain (DD)

SEQ ID NO: 3290 - protein, 187 aa, synthetic construct; identical to SEQ ID NO: 46
  REGION 1..187: note = Description of Artificial Sequence: Synthetic destabilizing domain (DD)

SEQ ID NO: 3291 - protein, 187 aa, synthetic construct; identical to SEQ ID NO: 47
  REGION 1..187: note = Description of Artificial Sequence: Synthetic destabilizing domain (DD)

SEQ ID NO: 3292 - protein, 187 aa, synthetic construct; identical to SEQ ID NO: 48
  REGION 1..187: note = Description of Artificial Sequence: Synthetic destabilizing domain (DD)

SEQ ID NO: 3293 - protein, 187 aa, synthetic construct; identical to SEQ ID NO: 49
  REGION 1..187: note = Description of Artificial Sequence: Synthetic destabilizing domain (DD)

SEQ ID NO: 3294 - protein, 187 aa, synthetic construct; identical to SEQ ID NO: 50
  REGION 1..187: note = Description of Artificial Sequence: Synthetic destabilizing domain (DD)

SEQ ID NO: 3295 - protein, 187 aa, synthetic construct; identical to SEQ ID NO: 51
  REGION 1..187: note = Description of Artificial Sequence: Synthetic destabilizing domain (DD)

SEQ ID NO: 3296 - protein, 187 aa, synthetic construct; identical to SEQ ID NO: 52
  REGION 1..187: note = Description of Artificial Sequence: Synthetic destabilizing domain (DD)

SEQ ID NO: 3297 - protein, 187 aa, synthetic construct; identical to SEQ ID NO: 53
  REGION 1..187: note = Description of Artificial Sequence: Synthetic destabilizing domain (DD)

SEQ ID NO: 3298 - protein, 187 aa, synthetic construct; identical to SEQ ID NO: 54
  REGION 1..187: note = Description of Artificial Sequence: Synthetic destabilizing domain (DD)

SEQ ID NO: 3299 - protein, 186 aa, synthetic construct; identical to SEQ ID NO: 55
  REGION 1..186: note = Description of Artificial Sequence: Synthetic destabilizing domain (DD)

SEQ ID NO: 3300 - protein, 186 aa, synthetic construct; identical to SEQ ID NO: 56
  REGION 1..186: note = Description of Artificial Sequence: Synthetic destabilizing domain (DD)

SEQ ID NO: 3301 - protein, 186 aa, synthetic construct; identical to SEQ ID NO: 57
  REGION 1..186: note = Description of Artificial Sequence: Synthetic destabilizing domain (DD)

SEQ ID NO: 3302 - protein, 186 aa, synthetic construct; identical to SEQ ID NO: 1196
  REGION 1..186: note = Description of Artificial Sequence: Synthetic destabilizing domain (DD)

SEQ ID NO: 3303 - protein, 187 aa, synthetic construct; identical to SEQ ID NO: 59
  REGION 1..187: note = Description of Artificial Sequence: Synthetic destabilizing domain (DD)

SEQ ID NO: 3304 - protein, 187 aa, synthetic construct; identical to SEQ ID NO: 60
  REGION 1..187: note = Description of Artificial Sequence: Synthetic destabilizing domain (DD)

SEQ ID NO: 3305 - protein, 186 aa, synthetic construct; identical to SEQ ID NO: 61
  REGION 1..186: note = Description of Artificial Sequence: Synthetic destabilizing domain (DD)

SEQ ID NO: 3306 - protein, 187 aa, synthetic construct; identical to SEQ ID NO: 62
  REGION 1..187: note = Description of Artificial Sequence: Synthetic destabilizing domain (DD)

SEQ ID NO: 3307 - protein, 187 aa, synthetic construct; identical to SEQ ID NO: 63
  REGION 1..187: note = Description of Artificial Sequence: Synthetic destabilizing domain (DD)

SEQ ID NO: 3308 - protein, 187 aa, synthetic construct; identical to SEQ ID NO: 64
  REGION 1..187: note = Description of Artificial Sequence: Synthetic destabilizing domain (DD)

SEQ ID NO: 3309 - protein, 187 aa, synthetic construct; identical to SEQ ID NO: 65
  REGION 1..187: note = Description of Artificial Sequence: Synthetic destabilizing domain (DD)

SEQ ID NO: 3310 - protein, 187 aa, synthetic construct; identical to SEQ ID NO: 66
  REGION 1..187: note = Description of Artificial Sequence: Synthetic destabilizing domain (DD)

SEQ ID NO: 3311 - protein, 187 aa, synthetic construct; identical to SEQ ID NO: 67
  REGION 1..187: note = Description of Artificial Sequence: Synthetic destabilizing domain (DD)

SEQ ID NO: 3312 - protein, 187 aa, synthetic construct; identical to SEQ ID NO: 68
  REGION 1..187: note = Description of Artificial Sequence: Synthetic destabilizing domain (DD)

SEQ ID NO: 3313 - protein, 187 aa, synthetic construct; identical to SEQ ID NO: 69
  REGION 1..187: note = Description of Artificial Sequence: Synthetic destabilizing domain (DD)

SEQ ID NO: 3314 - protein, 187 aa, synthetic construct; identical to SEQ ID NO: 70
  REGION 1..187: note = Description of Artificial Sequence: Synthetic destabilizing domain (DD)

SEQ ID NO: 3315 - protein, 186 aa, synthetic construct; identical to SEQ ID NO: 71
  REGION 1..186: note = Description of Artificial Sequence: Synthetic destabilizing domain (DD)

SEQ ID NO: 3316 - DNA, 1305 bp, synthetic construct; identical to SEQ ID NO: 142
  misc_feature 1..1305: note = Description of Artificial Sequence: Synthetic polynucleotide
  source 1..1305: mol_type = other DNA

SEQ ID NO: 3317 - DNA, 1302 bp, synthetic construct; identical to SEQ ID NO: 143
  misc_feature 1..1302: note = Description of Artificial Sequence: Synthetic polynucleotide
  source 1..1302: mol_type = other DNA

SEQ ID NO: 3318 - DNA, 1215 bp, synthetic construct; identical to SEQ ID NO: 144
  misc_feature 1..1215: note = Description of Artificial Sequence: Synthetic polynucleotide
  source 1..1215: mol_type = other DNA

SEQ ID NO: 3319 - DNA, 1305 bp, synthetic construct; identical to SEQ ID NO: 145
  misc_feature 1..1305: note = Description of Artificial Sequence: Synthetic polynucleotide
  source 1..1305: mol_type = other DNA

SEQ ID NO: 3320 - DNA, 1305 bp, synthetic construct; identical to SEQ ID NO: 146
  misc_feature 1..1305: note = Description of Artificial Sequence: Synthetic polynucleotide
  source 1..1305: mol_type = other DNA

SEQ ID NO: 3321 - DNA, 1305 bp, synthetic construct; identical to SEQ ID NO: 147
  misc_feature 1..1305: note = Description of Artificial Sequence: Synthetic polynucleotide
  source 1..1305: mol_type = other DNA

SEQ ID NO: 3322 - DNA, 1305 bp, synthetic construct; identical to SEQ ID NO: 148
  misc_feature 1..1305: note = Description of Artificial Sequence: Synthetic polynucleotide
  source 1..1305: mol_type = other DNA

SEQ ID NO: 3323 - DNA, 1305 bp, synthetic construct; identical to SEQ ID NO: 149
  misc_feature 1..1305: note = Description of Artificial Sequence: Synthetic polynucleotide
  source 1..1305: mol_type = other DNA

SEQ ID NO: 3324 - DNA, 1305 bp, synthetic construct; identical to SEQ ID NO: 150
  misc_feature 1..1305: note = Description of Artificial Sequence: Synthetic polynucleotide
  source 1..1305: mol_type = other DNA

SEQ ID NO: 3325 - DNA, 1305 bp, synthetic construct; identical to SEQ ID NO: 151
  misc_feature 1..1305: note = Description of Artificial Sequence: Synthetic polynucleotide
  source 1..1305: mol_type = other DNA

SEQ ID NO: 3326 - DNA, 1305 bp, synthetic construct; identical to SEQ ID NO: 152
  misc_feature 1..1305: note = Description of Artificial Sequence: Synthetic polynucleotide
  source 1..1305: mol_type = other DNA

SEQ ID NO: 3327 - DNA, 1305 bp, synthetic construct; identical to SEQ ID NO: 153
  misc_feature 1..1305: note = Description of Artificial Sequence: Synthetic polynucleotide
  source 1..1305: mol_type = other DNA

SEQ ID NO: 3328 - DNA, 1305 bp, synthetic construct; identical to SEQ ID NO: 154
  misc_feature 1..1305: note = Description of Artificial Sequence: Synthetic polynucleotide
  source 1..1305: mol_type = other DNA

SEQ ID NO: 3329 - DNA, 1302 bp, synthetic construct; identical to SEQ ID NO: 155
  misc_feature 1..1302: note = Description of Artificial Sequence: Synthetic polynucleotide
  source 1..1302: mol_type = other DNA

SEQ ID NO: 3330 - DNA, 1302 bp, synthetic construct; identical to SEQ ID NO: 156
  misc_feature 1..1302: note = Description of Artificial Sequence: Synthetic polynucleotide
  source 1..1302: mol_type = other DNA

SEQ ID NO: 3331 - DNA, 1302 bp, synthetic construct; identical to SEQ ID NO: 157
  misc_feature 1..1302: note = Description of Artificial Sequence: Synthetic polynucleotide
  source 1..1302: mol_type = other DNA

SEQ ID NO: 3332 - DNA, 1302 bp, synthetic construct; identical to SEQ ID NO: 158
  misc_feature 1..1302: note = Description of Artificial Sequence: Synthetic polynucleotide
  source 1..1302: mol_type = other DNA

SEQ ID NO: 3333 - DNA, 1302 bp, synthetic construct; identical to SEQ ID NO: 159
  misc_feature 1..1302: note = Description of Artificial Sequence: Synthetic polynucleotide
  source 1..1302: mol_type = other DNA

SEQ ID NO: 3334 - DNA, 1302 bp, synthetic construct; identical to SEQ ID NO: 160
  misc_feature 1..1302: note = Description of Artificial Sequence: Synthetic polynucleotide
  source 1..1302: mol_type = other DNA

SEQ ID NO: 3335 - DNA, 1302 bp, synthetic construct; identical to SEQ ID NO: 161
  misc_feature 1..1302: note = Description of Artificial Sequence: Synthetic polynucleotide
  source 1..1302: mol_type = other DNA

SEQ ID NO: 3336 - DNA, 1302 bp, synthetic construct; identical to SEQ ID NO: 162
  misc_feature 1..1302: note = Description of Artificial Sequence: Synthetic polynucleotide
  source 1..1302: mol_type = other DNA

SEQ ID NO: 3337 - DNA, 1302 bp, synthetic construct; identical to SEQ ID NO: 161
  misc_feature 1..1302: note = Description of Artificial Sequence: Synthetic polynucleotide
  source 1..1302: mol_type = other DNA

SEQ ID NO: 3338 - DNA, 1302 bp, synthetic construct; identical to SEQ ID NO: 164
  misc_feature 1..1302: note = Description of Artificial Sequence: Synthetic polynucleotide
  source 1..1302: mol_type = other DNA

SEQ ID NO: 3339 - DNA, 2034 bp, synthetic construct; identical to SEQ ID NO: 165
  misc_feature 1..2034: note = Description of Artificial Sequence: Synthetic polynucleotide
  source 1..2034: mol_type = other DNA

SEQ ID NO: 3340 - DNA, 2034 bp, synthetic construct; identical to SEQ ID NO: 166
  misc_feature 1..2034: note = Description of Artificial Sequence: Synthetic polynucleotide
  source 1..2034: mol_type = other DNA

SEQ ID NO: 3341 - DNA, 2034 bp, synthetic construct; identical to SEQ ID NO: 167
  misc_feature 1..2034: note = Description of Artificial Sequence: Synthetic polynucleotide
  source 1..2034: mol_type = other DNA

SEQ ID NO: 3342 - DNA, 2034 bp, synthetic construct; identical to SEQ ID NO: 1707
  misc_feature 1..2034: note = Description of Artificial Sequence: Synthetic polynucleotide
  source 1..2034: mol_type = other DNA

SEQ ID NO: 3343 - DNA, 1188 bp, synthetic construct; identical to SEQ ID NO: 169
  misc_feature 1..1188: note = Description of Artificial Sequence: Synthetic polynucleotide
  source 1..1188: mol_type = other DNA

SEQ ID NO: 3344 - DNA, 1752 bp, synthetic construct; identical to SEQ ID NO: 170
  misc_feature 1..1752: note = Description of Artificial Sequence: Synthetic polynucleotide
  source 1..1752: mol_type = other DNA

SEQ ID NO: 3345 - DNA, 1752 bp, synthetic construct; identical to SEQ ID NO: 171
  misc_feature 1..1752: note = Description of Artificial Sequence: Synthetic polynucleotide
  source 1..1752: mol_type = other DNA

SEQ ID NO: 3346 - DNA, 1623 bp, synthetic construct; identical to SEQ ID NO: 172
  misc_feature 1..1623: note = Description of Artificial Sequence: Synthetic polynucleotide
  source 1..1623: mol_type = other DNA

SEQ ID NO: 3347 - DNA, 2214 bp, synthetic construct; identical to SEQ ID NO: 173
  misc_feature 1..2214: note = Description of Artificial Sequence: Synthetic polynucleotide
  source 1..2214: mol_type = other DNA

SEQ ID NO: 3348 - DNA, 2062 bp, synthetic construct; identical to SEQ ID NO: 174
  misc_feature 1..2062: note = Description of Artificial Sequence: Synthetic polynucleotide
  source 1..2062: mol_type = other DNA

SEQ ID NO: 3349 - DNA, 2062 bp, synthetic construct; identical to SEQ ID NO: 175
  misc_feature 1..2062: note = Description of Artificial Sequence: Synthetic polynucleotide
  source 1..2062: mol_type = other DNA

SEQ ID NO: 3350 - DNA, 2061 bp, synthetic construct; identical to SEQ ID NO: 176
  misc_feature 1..2061: note = Description of Artificial Sequence: Synthetic polynucleotide
  source 1..2061: mol_type = other DNA

SEQ ID NO: 3351 - DNA, 2061 bp, synthetic construct; identical to SEQ ID NO: 177
  misc_feature 1..2061: note = Description of Artificial Sequence: Synthetic polynucleotide
  source 1..2061: mol_type = other DNA

SEQ ID NO: 3352 - DNA, 1824 bp, synthetic construct; identical to SEQ ID NO: 178
  misc_feature 1..1824: note = Description of Artificial Sequence: Synthetic polynucleotide
  source 1..1824: mol_type = other DNA

SEQ ID NO: 3353 - DNA, 1824 bp, synthetic construct; identical to SEQ ID NO: 179
  misc_feature 1..1824: note = Description of Artificial Sequence: Synthetic polynucleotide
  source 1..1824: mol_type = other DNA

SEQ ID NO: 3354 - DNA, 1824 bp, synthetic construct; identical to SEQ ID NO: 180
  misc_feature 1..1824: note = Description of Artificial Sequence: Synthetic polynucleotide
  source 1..1824: mol_type = other DNA

SEQ ID NO: 3355 - DNA, 2217 bp, synthetic construct; identical to SEQ ID NO: 181
  misc_feature 1..2217: note = Description of Artificial Sequence: Synthetic polynucleotide
  source 1..2217: mol_type = other DNA

SEQ ID NO: 3356 - DNA, 2217 bp, synthetic construct; identical to SEQ ID NO: 182
  misc_feature 1..2217: note = Description of Artificial Sequence: Synthetic polynucleotide
  source 1..2217: mol_type = other DNA

SEQ ID NO: 3357 - DNA, 2217 bp, synthetic construct; identical to SEQ ID NO: 183
  misc_feature 1..2217: note = Description of Artificial Sequence: Synthetic polynucleotide
  source 1..2217: mol_type = other DNA

SEQ ID NO: 3358 - DNA, 2217 bp, synthetic construct; identical to SEQ ID NO: 184
  misc_feature 1..2217: note = Description of Artificial Sequence: Synthetic polynucleotide
  source 1..2217: mol_type = other DNA

SEQ ID NO: 3359 - DNA, 1281 bp, synthetic construct; identical to SEQ ID NO: 185
  misc_feature 1..1281: note = Description of Artificial Sequence: Synthetic polynucleotide
  source 1..1281: mol_type = other DNA

SEQ ID NO: 3360 - DNA, 1302 bp, synthetic construct; identical to SEQ ID NO: 186
  misc_feature 1..1302: note = Description of Artificial Sequence: Synthetic polynucleotide
  source 1..1302: mol_type = other DNA

SEQ ID NO: 3361 - DNA, 1302 bp, synthetic construct; identical to SEQ ID NO: 187
  misc_feature 1..1302: note = Description of Artificial Sequence: Synthetic polynucleotide
  source 1..1302: mol_type = other DNA

SEQ ID NO: 3362 - DNA, 1302 bp, synthetic construct; identical to SEQ ID NO: 188
  misc_feature 1..1302: note = Description of Artificial Sequence: Synthetic polynucleotide
  source 1..1302: mol_type = other DNA

SEQ ID NO: 3363 - DNA, 1302 bp, synthetic construct; identical to SEQ ID NO: 189
  misc_feature 1..1302: note = Description of Artificial Sequence: Synthetic polynucleotide
  source 1..1302: mol_type = other DNA

SEQ ID NO: 3364 - DNA, 1302 bp, synthetic construct; identical to SEQ ID NO: 190
  misc_feature 1..1302: note = Description of Artificial Sequence: Synthetic polynucleotide
  source 1..1302: mol_type = other DNA

SEQ ID NO: 3365 - DNA, 1302 bp, synthetic construct; identical to SEQ ID NO: 191
  misc_feature 1..1302: note = Description of Artificial Sequence: Synthetic polynucleotide
  source 1..1302: mol_type = other DNA

SEQ ID NO: 3366 - protein, 107 aa, Homo sapiens; identical to SEQ ID NO: 192

SEQ ID NO: 3367 - protein, 187 aa, Homo sapiens; identical to SEQ ID NO: 1

SEQ ID NO: 3368 - protein, 159 aa, Escherichia coli [sequence omitted]

SEQ ID NO: 3369 - protein, 327 aa, Homo sapiens; identical to SEQ ID NO: 195

SEQ ID NO: 3370 - protein, 189 aa, Homo sapiens; identical to SEQ ID NO: 196

SEQ ID NO: 3371 - protein, 260 aa, Homo sapiens; identical to SEQ ID NO: 197

SEQ ID NO: 3372 - protein, 231 aa, Homo sapiens; identical to SEQ ID NO: 198

SEQ ID NO: 3373 - protein, 449 aa, synthetic construct; identical to SEQ ID NO: 199
  REGION 1..449: note = Description of Artificial Sequence: Synthetic heavy chain variable domain

SEQ ID NO: 3374 - protein, 223 aa, synthetic construct; identical to SEQ ID NO: 200
  REGION 1..223: note = Description of Artificial Sequence: Synthetic heavy chain variable domain

SEQ ID NO: 3375 - protein, 234 aa, synthetic construct; identical to SEQ ID NO: 201
  REGION 1..234: note = Description of Artificial Sequence: Synthetic heavy chain variable domain

SEQ ID NO: 3376 - protein, 460 aa, synthetic construct; identical to SEQ ID NO: 202
  REGION 1..460: note = Description of Artificial Sequence: Synthetic heavy chain variable domain

SEQ ID NO: 3377 - protein, 241 aa, synthetic construct; identical to SEQ ID NO: 203
  REGION 1..241: note = Description of Artificial Sequence: Synthetic heavy chain variable domain

SEQ ID NO: 3378 - protein, 471 aa, synthetic construct; identical to SEQ ID NO: 204
  REGION 1..471: note = Description of Artificial Sequence: Synthetic heavy chain variable domain

SEQ ID NO: 3379 - protein, 120 aa, synthetic construct; identical to SEQ ID NO: 205
  REGION 1..120: note = Description of Artificial Sequence: Synthetic heavy chain variable domain

SEQ ID NO: 3380 - protein, 111 aa, synthetic construct; identical to SEQ ID NO: 206
  REGION 1..111: note = Description of Artificial Sequence: Synthetic heavy chain variable domain

SEQ ID NO: 3381 - protein, 464 aa, synthetic construct; identical to SEQ ID NO: 207
  REGION 1..464: note = Description of Artificial Sequence: Synthetic heavy chain variable domain

SEQ ID NO: 3382 - protein, 137 aa, synthetic construct; identical to SEQ ID NO: 208
  REGION 1..137: note = Description of Artificial Sequence: Synthetic heavy chain variable domain

SEQ ID NO: 3383 - protein, 124 aa, synthetic construct; identical to SEQ ID NO: 209
  REGION 1..124: note = Description of Artificial Sequence: Synthetic heavy chain variable domain

SEQ ID NO: 3384 - protein, 130 aa, synthetic construct; identical to SEQ ID NO: 210
  REGION 1..130: note = Description of Artificial Sequence: Synthetic heavy chain variable domain

SEQ ID NO: 3385 - protein, 125 aa, synthetic construct; identical to SEQ ID NO: 211
  REGION 1..125: note = Description of Artificial Sequence: Synthetic heavy chain variable domain

SEQ ID NO: 3386 - protein, 125 aa, synthetic construct; identical to SEQ ID NO: 212
  REGION 1..125: note = Description of Artificial Sequence: Synthetic heavy chain variable domain

SEQ ID NO: 3387 - protein, 228 aa, synthetic construct; identical to SEQ ID NO: 213
  REGION 1..228: note = Description of Artificial Sequence: Synthetic heavy chain variable domain

SEQ ID NO: 3388 - protein, 98 aa, synthetic construct; identical to SEQ ID NO: 214
  REGION 1..98: note = Description of Artificial Sequence: Synthetic heavy chain variable domain
  MOD_RES 64..65: note = Any amino acid
  MOD_RES 68..69: note = Any amino acid
  MOD_RES 93: note = Any amino acid
  MOD_RES 98: note = Any amino acid

SEQ ID NO: 3389 - protein, 125 aa, synthetic construct; identical to SEQ ID NO: 215
  REGION 1..125: note = Description of Artificial Sequence: Synthetic heavy chain variable domain
  MOD_RES 76: note = Any amino acid

SEQ ID NO: 3390 - protein, 125 aa, synthetic construct; identical to SEQ ID NO: 216
  REGION 1..125: note = Description of Artificial Sequence: Synthetic heavy chain variable domain

SEQ ID NO: 3391 - protein, 125 aa, synthetic construct; identical to SEQ ID NO: 217
  REGION 1..125: note = Description of Artificial Sequence: Synthetic heavy chain variable domain

SEQ ID NO: 3392 - protein, 125 aa, synthetic construct; identical to SEQ ID NO: 218
  REGION 1..125: note = Description of Artificial Sequence: Synthetic heavy chain variable domain

SEQ ID NO: 3393 - protein, 125 aa, synthetic construct; identical to SEQ ID NO: 219
  REGION 1..125: note = Description of Artificial Sequence: Synthetic heavy chain variable domain

SEQ ID NO: 3394 - protein, 125 aa, synthetic construct; identical to SEQ ID NO: 220
  REGION 1..125: note = Description of Artificial Sequence: Synthetic heavy chain variable domain

SEQ ID NO: 3395 - protein, 125 aa, synthetic construct; identical to SEQ ID NO: 221
  REGION 1..125: note = Description of Artificial Sequence: Synthetic heavy chain variable domain

SEQ ID NO: 3396 - protein, 464 aa, synthetic construct; identical to SEQ ID NO: 207
  REGION 1..464: note = Description of Artificial Sequence: Synthetic heavy chain variable domain

SEQ ID NO: 3397 - protein, 120 aa, synthetic construct; identical to SEQ ID NO: 205
  REGION 1..120: note = Description of Artificial Sequence: Synthetic heavy chain variable domain

SEQ ID NO: 3398 - protein, 218 aa, synthetic construct; identical to SEQ ID NO: 224
  REGION 1..218: note = Description of Artificial Sequence: Synthetic heavy chain variable domain

SEQ ID NO: 3399 - protein, 219 aa, synthetic construct; identical to SEQ ID NO: 225
  REGION 1..219: note = Description of Artificial Sequence: Synthetic heavy chain variable domain

SEQ ID NO: 3400 - protein, 460 aa, synthetic construct; identical to SEQ ID NO: 202
  REGION 1..460: note = Description of Artificial Sequence: Synthetic heavy chain variable domain

SEQ ID NO: 3401 - protein, 242 aa, synthetic construct; identical to SEQ ID NO: 227
  REGION 1..242: note = Description of Artificial Sequence: Synthetic heavy chain variable domain

SEQ ID NO: 3402 - protein, 471 aa, synthetic construct; identical to SEQ ID NO: 204
  REGION 1..471: note = Description of Artificial Sequence: Synthetic heavy chain variable domain

SEQ ID NO: 3403 - protein, 118 aa, synthetic construct; identical to SEQ ID NO: 229
  REGION 1..118: note = Description of Artificial Sequence: Synthetic heavy chain variable domain

SEQ ID NO: 3404 - protein, 119 aa, synthetic construct; identical to SEQ ID NO: 230
  REGION 1..119: note = Description of Artificial Sequence: Synthetic heavy chain variable domain

SEQ ID NO: 3405 - protein, 112 aa, synthetic construct; identical to SEQ ID NO: 231
  REGION 1..112: note = Description of Artificial Sequence: Synthetic light chain variable domain

SEQ ID NO: 3406 - protein, 447 aa, synthetic construct; identical to SEQ ID NO: 232
  REGION 1..447: note = Description of Artificial Sequence: Synthetic light chain variable domain

SEQ ID NO: 3407 - protein, 111 aa, synthetic construct; identical to SEQ ID NO: 233
  REGION 1..111: note = Description of Artificial Sequence: Synthetic light chain variable domain

SEQ ID NO: 3408 - protein, 107 aa, synthetic construct; identical to SEQ ID NO: 234
  REGION 1..107: note = Description of Artificial Sequence: Synthetic light chain variable domain

SEQ ID NO: 3409 - protein, 214 aa, synthetic construct; identical to SEQ ID NO: 235
  REGION 1..214: note = Description of Artificial Sequence: Synthetic light chain variable domain

SEQ ID NO: 3410 - protein, 237 aa, synthetic construct; identical to SEQ ID NO: 236
  REGION 1..237: note = Description of Artificial Sequence: Synthetic light chain variable domain

SEQ ID NO: 3411 - protein, 107 aa, synthetic construct; identical to SEQ ID NO: 237
  REGION 1..107: note = Description of Artificial Sequence: Synthetic light chain variable domain

SEQ ID NO: 3412 - protein, 107 aa, synthetic construct; identical to SEQ ID NO: 237
  REGION 1..107: note = Description of Artificial Sequence: Synthetic light chain variable domain

SEQ ID NO: 3413 - protein, 115 aa, synthetic construct; identical to SEQ ID NO: 239
  REGION 1..115: note = Description of Artificial Sequence: Synthetic light chain variable domain

SEQ ID NO: 3414 - protein, 107 aa, synthetic construct; identical to SEQ ID NO: 237
  REGION 1..107: note = Description of Artificial Sequence: Synthetic light chain variable domain

SEQ ID NO: 3415 - protein, 112 aa, synthetic construct; identical to SEQ ID NO: 241
  REGION 1..112: note = Description of Artificial Sequence: Synthetic light chain variable domain

SEQ ID NO: 3416 - protein, 106 aa, synthetic construct; identical to SEQ ID NO: 242
  REGION 1..106: note = Description of Artificial Sequence: Synthetic light chain variable domain

SEQ ID NO: 3417 - protein, 106 aa, synthetic construct; identical to SEQ ID NO: 243
  REGION 1..106: note = Description of Artificial Sequence: Synthetic light chain variable domain

SEQ ID NO: 3418 - protein, 110 aa, synthetic construct; identical to SEQ ID NO: 244
  REGION 1..110: note = Description of Artificial Sequence: Synthetic light chain variable domain

SEQ ID NO: 3419 - protein, 109 aa, synthetic construct; identical to SEQ ID NO: 245
  REGION 1..109: note = Description of Artificial Sequence: Synthetic light chain variable domain

SEQ ID NO: 3420 - protein, 108 aa, synthetic construct; identical to SEQ ID NO: 246
  REGION 1..108: note = Description of Artificial Sequence: Synthetic light chain variable domain

SEQ ID NO: 3421 - protein, 107 aa, synthetic construct; identical to SEQ ID NO: 247
  REGION 1..107: note = Description of Artificial Sequence: Synthetic light chain variable domain

SEQ ID NO: 3422 - protein, 109 aa, synthetic construct; identical to SEQ ID NO: 248
  REGION 1..109: note = Description of Artificial Sequence: Synthetic light chain variable domain

SEQ ID NO: 3423 - protein, 109 aa, synthetic construct; identical to SEQ ID NO: 249
  REGION 1..109: note = Description of Artificial Sequence: Synthetic light chain variable domain

SEQ ID NO: 3424 - protein, 111 aa, synthetic construct; identical to SEQ ID NO: 250
  REGION 1..111: note = Description of Artificial Sequence: Synthetic light chain variable domain

SEQ ID NO: 3425 - protein, 109 aa, synthetic construct; identical to SEQ ID NO: 251
  REGION 1..109: note = Description of Artificial Sequence: Synthetic light chain variable domain
  MOD_RES 5..6: note = Any amino acid
  MOD_RES 8..9: note = Any amino acid
  MOD_RES 93: note = Any amino acid
  MOD_RES 104: note = Any amino acid

SEQ ID NO: 3426 - protein, 112 aa, synthetic construct; identical to SEQ ID NO: 252
  REGION 1..112: note = Description of Artificial Sequence: Synthetic light chain variable domain
  MOD_RES 61: note = Any amino acid

SEQ ID NO: 3427 - protein, 112 aa, synthetic construct; identical to SEQ ID NO: 253
  REGION 1..112: note = Description of Artificial Sequence: Synthetic light chain variable domain

SEQ ID NO: 3428 - protein, 110 aa, synthetic construct; identical to SEQ ID NO: 254
  REGION 1..110: note = Description of Artificial Sequence: Synthetic light chain variable domain

SEQ ID NO: 3429 - protein, 112 aa, synthetic construct; identical to SEQ ID NO: 255
  REGION 1..112: note = Description of Artificial Sequence: Synthetic light chain variable domain

SEQ ID NO: 3430 - protein, 111 aa, synthetic construct; identical to SEQ ID NO: 256
  REGION 1..111: note = Description of Artificial Sequence: Synthetic light chain variable domain

SEQ ID NO: 3431 - protein, 111 aa, synthetic construct; identical to SEQ ID NO: 257
  REGION 1..111: note = Description of Artificial Sequence: Synthetic light chain variable domain

SEQ ID NO: 3432 - protein, 106 aa, synthetic construct; identical to SEQ ID NO: 258
  REGION 1..106: note = Description of Artificial Sequence: Synthetic light chain variable domain

SEQ ID NO: 3433 - protein, 99 aa, synthetic construct; identical to SEQ ID NO: 259
  REGION 1..99: note = Description of Artificial Sequence: Synthetic light chain variable domain

SEQ ID NO: 3434 - protein, 110 aa, synthetic construct; identical to SEQ ID NO: 260
  REGION 1..110: note = Description of Artificial Sequence: Synthetic light chain variable domain

SEQ ID NO: 3435 - protein, 111 aa, synthetic construct; identical to SEQ ID NO: 261
  REGION 1..111: note = Description of Artificial Sequence: Synthetic light chain variable domain

SEQ ID NO: 3436 - protein, 124 aa, synthetic construct; identical to SEQ ID NO: 262
  REGION 1..124: note = Description of Artificial Sequence: Synthetic light chain variable domain

SEQ ID NO: 3437 - protein, 239 aa, synthetic construct; identical to SEQ ID NO: 263
  REGION 1..239: note = Description of Artificial Sequence: Synthetic light chain variable domain

SEQ ID NO: 3438 - protein, 111 aa, synthetic construct; identical to SEQ ID NO: 264
  REGION 1..111: note = Description of Artificial Sequence: Synthetic light chain variable domain

SEQ ID NO: 3439 - protein, 110 aa, synthetic construct; identical to SEQ ID NO: 265
  REGION 1..110: note = Description of Artificial Sequence: Synthetic light chain variable domain

SEQ ID NO: 3440 - protein, 111 aa, synthetic construct; identical to SEQ ID NO: 266
  REGION 1..111: note = Description of Artificial Sequence: Synthetic light chain variable domain

SEQ ID NO: 3441 - protein, 109 aa, synthetic construct; identical to SEQ ID NO: 267
  REGION 1..109: note = Description of Artificial Sequence: Synthetic light chain variable domain

SEQ ID NO: 3442 - protein, 108 aa, synthetic construct; identical to SEQ ID NO: 268
  REGION 1..108: note = Description of Artificial Sequence: Synthetic light chain variable domain

SEQ ID NO: 3443 - protein, 107 aa, synthetic construct; identical to SEQ ID NO: 269
  REGION 1..107: note = Description of Artificial Sequence: Synthetic light chain variable domain

SEQ ID NO: 3444 - protein, 109 aa, synthetic construct; identical to SEQ ID NO: 270
  REGION 1..109: note = Description of Artificial Sequence: Synthetic light chain variable domain

SEQ ID NO: 3445 - protein, 111 aa, synthetic construct; identical to SEQ ID NO: 271
  REGION 1..111: note = Description of Artificial Sequence: Synthetic light chain variable domain

SEQ ID NO: 3446 - protein, 121 aa, synthetic construct; identical to SEQ ID NO: 272
  REGION 1..121: note = Description of Artificial Sequence: Synthetic light chain variable domain

SEQ ID NO: 3447 - protein, 263 aa, synthetic construct; identical to SEQ ID NO: 273
  REGION 1..263: note = Description of Artificial Sequence: Synthetic single chain variable fragment

SEQ ID NO: 3448 - protein, 247 aa, synthetic construct; identical to SEQ ID NO: 274
  REGION 1..247: note = Description of Artificial Sequence: Synthetic single chain variable fragment

SEQ ID NO: 3449 - protein, 242 aa, synthetic construct; identical to SEQ ID NO: 275
  REGION 1..242: note = Description of Artificial Sequence: Synthetic single chain variable fragment

SEQ ID NO: 3450 - protein, 247 aa, synthetic construct; identical to SEQ ID NO: 276
  REGION 1..247: note = Description of Artificial Sequence: Synthetic single chain variable fragment

SEQ ID NO: 3451 - protein, 248 aa, synthetic construct; identical to SEQ ID NO: 277
  REGION 1..248: note = Description of Artificial Sequence: Synthetic single chain variable fragment

SEQ ID NO: 3452 - protein, 242 aa, synthetic construct; identical to SEQ ID NO: 278
  REGION 1..242: note = Description of Artificial Sequence: Synthetic single chain variable fragment

SEQ ID NO: 3453 - protein, 242 aa, synthetic construct; identical to SEQ ID NO: 279
  REGION 1..242: note = Description of Artificial Sequence: Synthetic single chain variable fragment

SEQ ID NO: 3454 - protein, 242 aa, synthetic construct; identical to SEQ ID NO: 280
  REGION 1..242: note = Description of Artificial Sequence: Synthetic single chain variable fragment

SEQ ID NO: 3455 - protein, 246 aa, synthetic construct; identical to SEQ ID NO: 281
  REGION 1..246: note = Description of Artificial Sequence: Synthetic single chain variable fragment

SEQ ID NO: 3456 - protein, 252 aa, synthetic construct; identical to SEQ ID NO: 282
  REGION 1..252: note = Description of Artificial Sequence: Synthetic single chain variable fragment

SEQ ID NO: 3457 - protein, 249 aa, synthetic construct; identical to SEQ ID NO: 283
  REGION 1..249: note = Description of Artificial Sequence: Synthetic single chain variable fragment

SEQ ID NO: 3458 - protein, 249 aa, synthetic construct; identical to SEQ ID NO: 284
  REGION 1..249: note = Description of Artificial Sequence: Synthetic single chain variable fragment

SEQ ID NO: 3459 - protein, 251 aa, synthetic construct; identical to SEQ ID NO: 285
  REGION 1..251: note = Description of Artificial Sequence: Synthetic single chain variable fragment

SEQ ID NO: 3460 - protein, 252 aa, synthetic construct; identical to SEQ ID NO: 286
  REGION 1..252: note = Description of Artificial Sequence: Synthetic single chain variable fragment

SEQ ID NO: 3461 - protein, 252 aa, synthetic construct; identical to SEQ ID NO: 286
  REGION 1..252: note = Description of Artificial Sequence: Synthetic single chain variable fragment

SEQ ID NO: 3462 - protein, 252 aa, synthetic construct; identical to SEQ ID NO: 288
  REGION 1..252: note = Description of Artificial Sequence: Synthetic single chain variable fragment

SEQ ID NO: 3463 - protein, 252 aa, synthetic construct; identical to SEQ ID NO: 288
  REGION 1..252: note = Description of Artificial Sequence: Synthetic single chain variable fragment

SEQ ID NO: 3464 - protein, 252 aa, synthetic construct; identical to SEQ ID NO: 288
  REGION 1..252: note = Description of Artificial Sequence: Synthetic single chain variable fragment

SEQ ID NO: 3465 - protein, 252 aa, synthetic construct; identical to SEQ ID NO: 291
  REGION 1..252: note = Description of Artificial Sequence: Synthetic single chain variable fragment
  MOD_RES 76: note = Any amino acid
  MOD_RES 201: note = Any amino acid

SEQ ID NO: 3466 - protein, 252 aa, synthetic construct; identical to SEQ ID NO: 286
  REGION 1..252: note = Description of Artificial Sequence: Synthetic single chain variable fragment

SEQ ID NO: 3467 - protein, 250 aa, synthetic construct; identical to SEQ ID NO: 293
  REGION 1..250: note = Description of Artificial Sequence: Synthetic single chain variable fragment

SEQ ID NO: 3468 - protein, 252 aa, synthetic construct; identical to SEQ ID NO: 294
  REGION 1..252: note = Description of Artificial Sequence: Synthetic single chain variable fragment

SEQ ID NO: 3469 - protein, 236 aa, synthetic construct; identical to SEQ ID NO: 295
  REGION 1..236: note = Description of Artificial Sequence: Synthetic single chain variable fragment

SEQ ID NO: 3470 - protein, 251 aa, synthetic construct; identical to SEQ ID NO: 296
  REGION 1..251: note = Description of Artificial Sequence: Synthetic single chain variable fragment

SEQ ID NO: 3471 - protein, 246 aa, synthetic construct; identical to SEQ ID NO: 297
  REGION 1..246: note = Description of Artificial Sequence: Synthetic single chain variable fragment

SEQ ID NO: 3472 - protein, 239 aa, synthetic construct; identical to SEQ ID NO: 298
  REGION 1..239: note = Description of Artificial Sequence: Synthetic single chain variable fragment

SEQ ID NO: 3473 - protein, 250 aa, synthetic construct; identical to SEQ ID NO: 299
  REGION 1..250: note = Description of Artificial Sequence: Synthetic single chain variable fragment

SEQ ID NO: 3474 - protein, 251 aa, synthetic construct; identical to SEQ ID NO: 300
  REGION 1..251: note = Description of Artificial Sequence: Synthetic single chain variable fragment

SEQ ID NO: 3475 - protein, 242 aa, synthetic construct; identical to SEQ ID NO: 301
  REGION 1..242: note = Description of Artificial Sequence: Synthetic single chain variable fragment

SEQ ID NO: 3476 - protein, 242 aa, synthetic construct; identical to SEQ ID NO: 302
  REGION 1..242: note = Description of Artificial Sequence: Synthetic single chain variable fragment

SEQ ID NO: 3477 - protein, 246 aa, synthetic construct; identical to SEQ ID NO: 303
  REGION 1..246: note = Description of Artificial Sequence: Synthetic single chain variable fragment

SEQ ID NO: 3478 - protein, 249 aa, synthetic construct; identical to SEQ ID NO: 304
  REGION 1..249: note = Description of Artificial Sequence: Synthetic single chain variable fragment

SEQ ID NO: 3479 - protein, 249 aa, synthetic construct; identical to SEQ ID NO: 305
  REGION 1..249: note = Description of Artificial Sequence: Synthetic single chain variable fragment

SEQ ID NO: 3480 - protein, 252 aa, synthetic construct; identical to SEQ ID NO: 288
  REGION 1..252: note = Description of Artificial Sequence: Synthetic single chain variable fragment

SEQ ID NO: 3481 - protein, 495 aa, synthetic construct; identical to SEQ ID NO: 307
  REGION 1..495: note = Description of Artificial Sequence: Synthetic single chain variable fragment

SEQ ID NO: 3482 - protein, 247 aa, synthetic construct; identical to SEQ ID NO: 308
  REGION 1..247: note = Description of Artificial Sequence: Synthetic single chain variable fragment

SEQ ID NO: 3483 - protein, 251 aa, synthetic construct; identical to SEQ ID NO: 309
  REGION 1..251: note = Description of Artificial Sequence: Synthetic single chain variable fragment

SEQ ID NO: 3484 - protein, 250 aa, synthetic construct; identical to SEQ ID NO: 310
  REGION 1..250: note = Description of Artificial Sequence: Synthetic single chain variable fragment

SEQ ID NO: 3485 - protein, 247 aa, synthetic construct; identical to SEQ ID NO: 311
  REGION 1..247: note = Description of Artificial Sequence: Synthetic single chain variable fragment

SEQ ID NO: 3486 - protein, 248 aa, synthetic construct; identical to SEQ ID NO: 312
  REGION 1..248: note = Description of Artificial Sequence: Synthetic single chain variable fragment

SEQ ID NO: 3487 - protein, 242 aa, synthetic construct; identical to SEQ ID NO: 313
  REGION 1..242: note = Description of Artificial Sequence: Synthetic single chain variable fragment

SEQ ID NO: 3488 - protein, 251 aa, synthetic construct; identical to SEQ ID NO: 314
  REGION 1..251: note = Description of Artificial Sequence: Synthetic single chain variable fragment

SEQ ID NO: 3489 - protein, 247 aa, synthetic construct; identical to SEQ ID NO: 315
  REGION 1..247: note = Description of Artificial Sequence: Synthetic single chain variable fragment

SEQ ID NO: 3490 - protein, 250 aa, synthetic construct; identical to SEQ ID NO: 316
  REGION 1..250: note = Description of Artificial Sequence: Synthetic single chain variable fragment

SEQ ID NO: 3491 - protein, 252 aa, synthetic construct; identical to SEQ ID NO: 317
  REGION 1..252: note = Description of Artificial Sequence: Synthetic single chain variable fragment

SEQ ID NO: 3492 - protein, 247 aa, synthetic construct; identical to SEQ ID NO: 318
  REGION 1..247: note = Description of Artificial Sequence: Synthetic single chain variable fragment

SEQ ID NO: 3493 - protein, 247 aa, synthetic construct; identical to SEQ ID NO: 319
  REGION 1..247: note = Description of Artificial Sequence: Synthetic single chain variable fragment

SEQ ID NO: 3494 - protein, 249 aa, synthetic construct; identical to SEQ ID NO: 320
  REGION 1..249: note = Description of Artificial Sequence: Synthetic single chain variable fragment

SEQ ID NO: 3495 - protein, 251 aa, synthetic construct; identical to SEQ ID NO: 321
  REGION 1..251: note = Description of Artificial Sequence: Synthetic single chain variable fragment

SEQ ID NO: 3496 - protein, 247 aa, synthetic construct; identical to SEQ ID NO: 322
  REGION 1..247: note = Description of Artificial Sequence: Synthetic single chain variable fragment

SEQ ID NO: 3497 - protein, 241 aa, synthetic construct; identical to SEQ ID NO: 323
  REGION 1..241: note = Description of Artificial Sequence: Synthetic single chain variable fragment

SEQ ID NO: 3498 - protein, 248 aa, synthetic construct; identical to SEQ ID NO: 277
  REGION 1..248: note = Description of Artificial Sequence: Synthetic single chain variable fragment

SEQ ID NO: 3499 - protein, 246 aa, synthetic construct; identical to SEQ ID NO: 281
  REGION 1..246: note = Description of Artificial Sequence: Synthetic single chain variable fragment

SEQ ID NO: 3500 - protein, 252 aa, synthetic construct; identical to SEQ ID NO: 282
  REGION 1..252: note = Description of Artificial Sequence: Synthetic single chain variable fragment

SEQ ID NO: 3501 - protein, 249 aa, synthetic construct; identical to SEQ ID NO: 283
  REGION 1..249: note = Description of Artificial Sequence: Synthetic single chain variable fragment

SEQ ID NO: 3502 - protein, 249 aa, synthetic construct; identical to SEQ ID NO: 284
  REGION 1..249: note = Description of Artificial Sequence: Synthetic single chain variable fragment

SEQ ID NO: 3503 - protein, 251 aa, synthetic construct; identical to SEQ ID NO: 285
  REGION 1..251: note = Description of Artificial Sequence: Synthetic single chain variable fragment

SEQ ID NO: 3504 - protein, 252 aa, synthetic construct; identical to SEQ ID NO: 286
  REGION 1..252: note = Description of Artificial Sequence: Synthetic single chain variable fragment

SEQ ID NO: 3505 - protein, 252 aa, synthetic construct; identical to SEQ ID NO: 286
  REGION 1..252: note = Description of Artificial Sequence: Synthetic single chain variable fragment

SEQ ID NO: 3506 - protein, 249 aa, synthetic construct; identical to SEQ ID NO: 332
  REGION 1..249: note = Description of Artificial Sequence: Synthetic single chain variable fragment
  MOD_RES 64..65: note = Any amino acid
  MOD_RES 68..69: note = Any amino acid
  MOD_RES 93: note = Any amino acid
  MOD_RES 98: note = Any amino acid
  MOD_RES 102: note = Any amino acid
  MOD_RES 104: note = Any amino acid
  MOD_RES 113: note = Any amino acid
  MOD_RES 145..146: note = Any amino acid
  MOD_RES 148..149: note = Any amino acid
  MOD_RES 233: note = Any amino acid
  MOD_RES 244: note = Any amino acid

SEQ ID NO: 3507 - protein, 252 aa, synthetic construct; identical to SEQ ID NO: 288
  REGION 1..252: note = Description of Artificial Sequence: Synthetic single chain variable fragment

SEQ ID NO: 3508 - protein, 252 aa, synthetic construct; identical to SEQ ID NO: 288
  REGION 1..252: note = Description of Artificial Sequence: Synthetic single chain variable fragment

SEQ ID NO: 3509 - protein, 252 aa, synthetic construct; identical to SEQ ID NO: 288
  REGION 1..252: note = Description of Artificial Sequence: Synthetic single chain variable fragment

SEQ ID NO: 3510 - protein, 252 aa, synthetic construct; identical to SEQ ID NO: 291
  REGION 1..252: note = Description of Artificial Sequence: Synthetic single chain variable fragment
  MOD_RES 76: note = Any amino acid
  MOD_RES 201: note = Any amino acid

SEQ ID NO: 3511 - protein, 252 aa, synthetic construct; identical to SEQ ID NO: 286
  REGION 1..252: note = Description of Artificial Sequence: Synthetic single chain variable fragment

SEQ ID NO: 3512 - protein, 250 aa, synthetic construct; identical to SEQ ID NO: 293
  REGION 1..250: note = Description of Artificial Sequence: Synthetic single chain variable fragment

SEQ ID NO: 3513 - protein, 252 aa, synthetic construct; identical to SEQ ID NO: 294
  REGION 1..252: note = Description of Artificial Sequence: Synthetic single chain variable fragment

SEQ ID NO: 3514 - protein, 236 aa, synthetic construct; identical to SEQ ID NO: 295
  REGION 1..236: note = Description of Artificial Sequence: Synthetic single chain variable fragment

SEQ ID NO: 3515 - protein, 251 aa, synthetic construct; identical to SEQ ID NO: 296
  REGION 1..251: note = Description of Artificial Sequence: Synthetic single chain variable fragment

SEQ ID NO: 3516 - protein, 246 aa, synthetic construct; identical to SEQ ID NO: 297
  REGION 1..246: note = Description of Artificial Sequence: Synthetic single chain variable fragment

SEQ ID NO: 3517 - protein, 239 aa, synthetic construct; identical to SEQ ID NO: 298
  REGION 1..239: note = Description of Artificial Sequence: Synthetic single chain variable fragment

SEQ ID NO: 3518 - protein, 250 aa, synthetic construct; identical to SEQ ID NO: 299
  REGION 1..250: note = Description of Artificial Sequence: Synthetic single chain variable fragment

SEQ ID NO: 3519 - protein, 251 aa, synthetic construct; identical to SEQ ID NO: 300
  REGION 1..251: note = Description of Artificial Sequence: Synthetic single chain variable fragment

SEQ ID NO: 3520 - protein, 273 aa, synthetic construct; identical to SEQ ID NO: 346
  REGION 1..273: note = Description of Artificial Sequence: Synthetic single chain variable fragment

SEQ ID NO: 3521 - protein, 270 aa, synthetic construct; identical to SEQ ID NO: 347
  REGION 1..270: note = Description of Artificial Sequence: Synthetic single chain variable fragment

SEQ ID NO: 3522 - protein, 277 aa, synthetic construct; identical to SEQ ID NO: 348
  REGION 1..277: note = Description of Artificial Sequence: Synthetic single chain variable fragment

SEQ ID NO: 3523 - protein, 246 aa, synthetic construct; identical to SEQ ID NO: 303
  REGION 1..246: note = Description of Artificial Sequence: Synthetic single chain variable fragment

SEQ ID NO: 3524 - protein, 249 aa, synthetic construct; identical to SEQ ID NO: 304
  REGION 1..249: note = Description of Artificial Sequence: Synthetic single chain variable fragment

SEQ ID NO: 3525 - protein, 249 aa, synthetic construct; identical to SEQ ID NO: 305
  REGION 1..249: note = Description of Artificial Sequence: Synthetic single chain variable fragment

SEQ ID NO: 3526 - protein, 252 aa, synthetic construct; identical to SEQ ID NO: 288
  REGION 1..252: note = Description of Artificial Sequence: Synthetic single chain variable fragment

SEQ ID NO: 3527 - protein, 251 aa, synthetic construct; identical to SEQ ID NO: 309
  REGION 1..251: note = Description of Artificial Sequence: Synthetic single chain variable fragment

SEQ ID NO: 3528 - protein, 250 aa, synthetic construct; identical to SEQ ID NO: 310
  REGION 1..250: note = Description of Artificial Sequence: Synthetic single chain variable fragment

SEQ ID NO: 3529 - protein, 247 aa, synthetic construct; identical to SEQ ID NO: 311
  REGION 1..247: note = Description of Artificial Sequence: Synthetic single chain variable fragment

SEQ ID NO: 3530 - protein, 248 aa, synthetic construct; identical to SEQ ID NO: 312
  REGION 1..248: note = Description of Artificial Sequence: Synthetic single chain variable fragment

SEQ ID NO: 3531 - protein, 251 aa, synthetic construct; identical to SEQ ID NO: 314
  REGION 1..251: note = Description of Artificial Sequence: Synthetic single chain variable fragment

SEQ ID NO: 3532 - protein, 250 aa, synthetic construct; identical to SEQ ID NO: 316
  REGION 1..250: note = Description of Artificial Sequence: Synthetic single chain variable fragment

SEQ ID NO: 3533 - protein, 249 aa, synthetic construct; identical to SEQ ID NO: 320
  REGION 1..249: note = Description of Artificial Sequence: Synthetic single chain variable fragment

SEQ ID NO: 3534 - protein, 251 aa, synthetic construct; identical to SEQ ID NO: 321
  REGION 1..251: note = Description of Artificial Sequence: Synthetic single chain variable fragment

SEQ ID NO: 3535 - protein, 249 aa, synthetic construct; identical to SEQ ID NO: 284
  REGION 1..249: note = Description of Artificial Sequence: Synthetic single chain variable fragment

SEQ ID NO: 3536 - protein, 242 aa, synthetic construct; identical to SEQ ID NO: 275
  REGION 1..242: note = Description of Artificial Sequence: Synthetic single chain variable fragment

SEQ ID NO: 3537 - protein, 245 aa, synthetic construct; identical to SEQ ID NO: 363
  REGION 1..245: note = Description of Artificial Sequence: Synthetic single chain variable fragment

SEQ ID NO: 3538 - protein, 119 aa, synthetic construct; identical to SEQ ID NO: 364
  REGION 1..119: note = Description of Artificial Sequence: Synthetic single chain variable fragment

SEQ ID NO: 3539 - protein, 438 aa, synthetic construct; identical to SEQ ID NO: 365
  REGION 1..438: note = Description of Artificial Sequence: Synthetic single chain variable fragment

SEQ ID NO: 3540 - protein, 272 aa, synthetic construct; identical to SEQ ID NO: 366
  REGION 1..272: note = Description of Artificial Sequence: Synthetic single chain variable fragment

SEQ ID NO: 3541 - protein, 267 aa, synthetic construct; identical to SEQ ID NO: 367
  REGION 1..267: note = Description of Artificial Sequence: Synthetic single chain variable fragment

SEQ ID NO: 3542 - protein, 270 aa, synthetic construct; identical to SEQ ID NO: 347
  REGION 1..270: note = Description of Artificial Sequence: Synthetic single chain variable fragment

SEQ ID NO: 3543 - protein, 277 aa, synthetic construct; identical to SEQ ID NO: 348
  REGION 1..277: note = Description of Artificial Sequence: Synthetic single chain variable fragment

SEQ ID NO: 3544 - protein, 242 aa, synthetic construct; identical to SEQ ID NO: 280
  REGION 1..242: note = Description of Artificial Sequence: Synthetic single chain variable fragment

SEQ ID NO: 3545 - protein, 242 aa, synthetic construct; identical to SEQ ID NO: 301
  REGION 1..242: note = Description of Artificial Sequence: Synthetic single chain variable fragment

SEQ ID NO: 3546 - protein, 242 aa, synthetic construct; identical to SEQ ID NO: 302
  REGION 1..242: note = Description of Artificial Sequence: Synthetic single chain variable fragment

SEQ ID NO: 3547 - protein, 247 aa, synthetic construct; identical to SEQ ID NO: 308
  REGION 1..247: note = Description of Artificial Sequence: Synthetic single chain variable fragment

SEQ ID NO: 3548 - protein, 247 aa, synthetic construct; identical to SEQ ID NO: 315
  REGION 1..247: note = Description of Artificial Sequence: Synthetic single chain variable fragment

SEQ ID NO: 3549 - protein, 247 aa, synthetic construct; identical to SEQ ID NO: 318
  REGION 1..247: note = Description of Artificial Sequence: Synthetic single chain variable fragment

SEQ ID NO: 3550 - protein, 247 aa, synthetic construct; identical to SEQ ID NO: 319
  REGION 1..247: note = Description of Artificial Sequence: Synthetic single chain variable fragment

SEQ ID NO: 3551 - protein, 247 aa, synthetic construct; identical to SEQ ID NO: 322
  REGION 1..247: note = Description of Artificial Sequence: Synthetic single chain variable fragment

SEQ ID NO: 3552 - protein, 247 aa, synthetic construct; identical to SEQ ID NO: 276
  REGION 1..247: note = Description of Artificial Sequence: Synthetic single chain variable fragment

SEQ ID NO: 3553 - protein, 242 aa, synthetic construct; identical to SEQ ID NO: 278
  REGION 1..242: note = Description of Artificial Sequence: Synthetic single chain variable fragment

SEQ ID NO: 3554 - protein, 495 aa, synthetic construct; identical to SEQ ID NO: 307
  REGION 1..495: note = Description of Artificial Sequence: Synthetic single chain variable fragment

SEQ ID NO: 3555 - protein, 242 aa, synthetic construct; identical to SEQ ID NO: 279
  REGION 1..242: note = Description of Artificial Sequence: Synthetic single chain variable fragment

SEQ ID NO: 3556 - protein, 242 aa, synthetic construct; identical to SEQ ID NO: 313
  REGION 1..242: note = Description of Artificial Sequence: Synthetic single chain variable fragment

SEQ ID NO: 3557 - protein, 252 aa, synthetic construct; identical to SEQ ID NO: 317
  REGION 1..252: note = Description of Artificial Sequence: Synthetic single chain variable fragment

SEQ ID NO: 3558 - protein, 250 aa, synthetic construct; identical to SEQ ID NO: 384
  REGION 1..250: note = Description of Artificial Sequence: Synthetic single chain variable fragment

SEQ ID NO: 3559 - protein, 242 aa, synthetic construct; identical to SEQ ID NO: 313
  REGION 1..242: note = Description of Artificial Sequence: Synthetic single chain variable fragment

SEQ ID NO: 3560 - protein, 251 aa, synthetic construct; identical to SEQ ID NO: 386
  REGION 1..251: note = Description of Artificial Sequence: Synthetic single chain variable fragment

SEQ ID NO: 3561 - protein, 271 aa, synthetic construct; identical to SEQ ID NO: 387
  REGION 1..271: note = Description of Artificial Sequence: Synthetic single chain variable fragment

SEQ ID NO: 3562 - protein, 248 aa, synthetic construct; identical to SEQ ID NO: 277
  REGION 1..248: note = Description of Artificial Sequence: Synthetic single chain variable fragment

SEQ ID NO: 3563 - protein, 246 aa, synthetic construct; identical to SEQ ID NO: 281
  REGION 1..246: note = Description of Artificial Sequence: Synthetic single chain variable fragment

SEQ ID NO: 3564 - protein, 252 aa, synthetic construct; identical to SEQ ID NO: 282
  REGION 1..252: note = Description of Artificial Sequence: Synthetic single chain variable fragment

SEQ ID NO: 3565 - protein, 249 aa, synthetic construct; identical to SEQ ID NO: 283
  REGION 1..249: note = Description of Artificial Sequence: Synthetic single chain variable fragment

SEQ ID NO: 3566 - protein, 251 aa, synthetic construct; identical to SEQ ID NO: 285
  REGION 1..251: note = Description of Artificial Sequence: Synthetic single chain variable fragment

SEQ ID NO: 3567 - protein, 252 aa, synthetic construct; identical to SEQ ID NO: 286
  REGION 1..252: note = Description of Artificial Sequence: Synthetic single chain variable fragment

SEQ ID NO: 3568 - protein, 249 aa, synthetic construct; identical to SEQ ID NO: 332
  REGION 1..249: note = Description of Artificial Sequence: Synthetic single chain variable fragment
  MOD_RES 64..65: note = Any amino acid
  MOD_RES 68..69: note = Any amino acid
  MOD_RES 93: note = Any amino acid
  MOD_RES 98: note = Any amino acid
  MOD_RES 102: note = Any amino acid
  MOD_RES 104: note = Any amino acid
  MOD_RES 113: note = Any amino acid
  MOD_RES 145..146: note = Any amino acid
  MOD_RES 148..149: note = Any amino acid
  MOD_RES 233: note = Any amino acid
  MOD_RES 244: note = Any amino acid

SEQ ID NO: 3569 - protein, 252 aa, synthetic construct; identical to SEQ ID NO: 291
  REGION 1..252: note = Description of Artificial Sequence: Synthetic single chain variable fragment
  MOD_RES 76: note = Any amino acid
  MOD_RES 201: note = Any amino acid

SEQ ID NO: 3570 - protein, 250 aa, synthetic construct; identical to SEQ ID NO: 293
  REGION 1..250: note = Description of Artificial Sequence: Synthetic single chain variable fragment

SEQ ID NO: 3571 - protein, 252 aa, synthetic construct; identical to SEQ ID NO: 294
  REGION 1..252: note = Description of Artificial Sequence: Synthetic single chain variable fragment

SEQ ID NO: 3572 - protein, 236 aa, synthetic construct; identical to SEQ ID NO: 295
  REGION 1..236: note = Description of Artificial Sequence: Synthetic single chain variable fragment

SEQ ID NO: 3573 - protein, 251 aa, synthetic construct; identical to SEQ ID NO: 296
  REGION 1..251: note = Description of Artificial Sequence: Synthetic single chain variable fragment

SEQ ID NO: 3574 - protein, 246 aa, synthetic construct; identical to SEQ ID NO: 297
  REGION 1..246: note = Description of Artificial Sequence: Synthetic single chain variable fragment

SEQ ID NO: 3575 - protein, 239 aa, synthetic construct; identical to SEQ ID NO: 298
  REGION 1..239: note = Description of Artificial Sequence: Synthetic single chain variable fragment

SEQ ID NO: 3576 - protein, 250 aa, synthetic construct; identical to SEQ ID NO: 299
  REGION 1..250: note = Description of Artificial Sequence: Synthetic single chain variable fragment

SEQ ID NO: 3577 - protein, 251 aa, synthetic construct; identical to SEQ ID NO: 300
  REGION 1..251: note = Description of Artificial Sequence: Synthetic single chain variable fragment

SEQ ID NO: 3578 - protein, 246 aa, synthetic construct; identical to SEQ ID NO: 303
  REGION 1..246: note = Description of Artificial Sequence: Synthetic single chain variable fragment

SEQ ID NO: 3579 - protein, 249 aa, synthetic construct; identical to SEQ ID NO: 304
  REGION 1..249: note = Description of Artificial Sequence: Synthetic single chain variable fragment

SEQ ID NO: 3580 - protein, 249 aa, synthetic construct; identical to SEQ ID NO: 305
  REGION 1..249: note = Description of Artificial Sequence: Synthetic single chain variable fragment

SEQ ID NO: 3581 - protein, 252 aa, synthetic construct; identical to SEQ ID NO: 288
  REGION 1..252: note = Description of Artificial Sequence: Synthetic single chain variable fragment

SEQ ID NO: 3582 - protein, 251 aa, synthetic construct; identical to SEQ ID NO: 309
  REGION 1..251: note = Description of Artificial Sequence: Synthetic single chain variable fragment

SEQ ID NO: 3583 - protein, 250 aa, synthetic construct; identical to SEQ ID NO: 310
  REGION 1..250: note = Description of Artificial Sequence: Synthetic single chain variable fragment

SEQ ID NO: 3584 - protein, 247 aa, synthetic construct; identical to SEQ ID NO: 311
  REGION 1..247: note = Description of Artificial Sequence: Synthetic single chain variable fragment

SEQ ID NO: 3585 - protein, 248 aa, synthetic construct; identical to SEQ ID NO: 312
  REGION 1..248: note = Description of Artificial Sequence: Synthetic single chain variable fragment

SEQ ID NO: 3586 - protein, 251 aa, synthetic construct; identical to SEQ ID NO: 314
  REGION 1..251: note = Description of Artificial Sequence: Synthetic single chain variable fragment

SEQ ID NO: 3587 - protein, 250 aa, synthetic construct; identical to SEQ ID NO: 316
  REGION 1..250: note = Description of Artificial Sequence: Synthetic single chain variable fragment

SEQ ID NO: 3588 - protein, 249 aa, synthetic construct; identical to SEQ ID NO: 320
  REGION 1..249: note = Description of Artificial Sequence: Synthetic single chain variable fragment

SEQ ID NO: 3589 - protein, 251 aa, synthetic construct; identical to SEQ ID NO: 321
  REGION 1..251: note = Description of Artificial Sequence: Synthetic single chain variable fragment

SEQ ID NO: 3590 - protein, 249 aa, synthetic construct; identical to SEQ ID NO: 284
  REGION 1..249: note = Description of Artificial Sequence: Synthetic single chain variable fragment

SEQ ID NO: 3591 - protein, 277 aa, synthetic construct; identical to SEQ ID NO: 417
  REGION 1..277: note = Description of Artificial Sequence: Synthetic single chain variable fragment

SEQ ID NO: 3592 - protein, 242 aa, synthetic construct; identical to SEQ ID NO: 313
  REGION 1..242: note = Description of Artificial Sequence: Synthetic CD19 scFv

SEQ ID NO: 3593 - protein, 112 aa, Homo sapiens; identical to SEQ ID NO: 419

SEQ ID NO: 3594 - DNA, 726 bp, synthetic construct; identical to SEQ ID NO: 420
  misc_feature 1..726: note = Description of Artificial Sequence: Synthetic CD19 scFv sequence
  source 1..726: mol_type = other DNA

SEQ ID NO: 3595 - protein, 46 aa, Homo sapiens; identical to SEQ ID NO: 528

SEQ ID NO: 3596 - protein, 31 aa, Homo sapiens; identical to SEQ ID NO: 529

SEQ ID NO: 3597 - protein, 27 aa, Homo sapiens
IISFFLALTSTALLFLLFFLTLRFSVV

SEQ ID NO: 3598 - protein, 26 aa, Homo sapiens
VAAILGLGLVLGLLGPLAILLALYLL

SEQ ID NO: 3599 - protein, 363 aa, Homo sapiens; identical to SEQ ID NO: 532

SEQ ID NO: 3600 - protein, 21 aa, Homo sapiens
AVFGCIFGALVIVTVGGFIFW

SEQ ID NO: 3601 - protein, 185 aa, Homo sapiens; identical to SEQ ID NO: 534

SEQ ID NO: 3602 - protein, 106 aa, Homo sapiens; identical to SEQ ID NO: 535

SEQ ID NO: 3603 - protein, 27 aa, Homo sapiens
FWVLVVVGGVLACYSLLVTVAFIIFWV

SEQ ID NO: 3604 - protein, 66 aa, Homo sapiens; identical to SEQ ID NO: 537

SEQ ID NO: 3605 - protein, 33 aa, Homo sapiens; identical to SEQ ID NO: 538

SEQ ID NO: 3606 - protein, 68 aa, Homo sapiens; identical to SEQ ID NO: 449

SEQ ID NO: 3607 - protein, 28 aa, Homo sapiens
MFWVLVVVGGVLACYSLLVTVAFIIFWV

SEQ ID NO: 3608 - protein, 26 aa, Homo sapiens
FWVLVVVGGVLACYSLLVTVAFHFWV

SEQ ID NO: 3609 - protein, 28 aa, Homo sapiens
MFWVLVVVGGVLACYSGGVTVAFIIFWV

SEQ ID NO: 3610 - protein, 26 aa, Homo sapiens
WVLVVVGGVLACYSLLVTVAFIIFWV

SEQ ID NO: 3611 - protein, 69 aa, Homo sapiens; identical to SEQ ID NO: 544

SEQ ID NO: 3612 - protein, 180 aa, Homo sapiens; identical to SEQ ID NO: 545

SEQ ID NO: 3613 - protein, 216 aa, Homo sapiens; identical to SEQ ID NO: 546

SEQ ID NO: 3614 - protein, 140 aa, Homo sapiens; identical to SEQ ID NO: 547

SEQ ID NO: 3615 - protein, 222 aa, Homo sapiens; identical to SEQ ID NO: 454

SEQ ID NO: 3616 - protein, 23 aa, Homo sapiens
LCYLLDGILFIYGVILTALFLRV

SEQ ID NO: 3617 - protein, 51 aa, Homo sapiens; identical to SEQ ID NO: 550

SEQ ID NO: 3618 - protein, 21 aa, Homo sapiens
LCYLLDGILFIYGVILTALFL

SEQ ID NO: 3619 - protein, 25 aa, Homo sapiens
ALIVLGGVAGLLLFIGLGIFFCVRC

SEQ ID NO: 3620 - protein, 22 aa, Homo sapiens
MALIVLGGVAGLLLFIGLGIFF

SEQ ID NO: 3621 - protein, 725 aa, Homo sapiens; identical to SEQ ID NO: 554

SEQ ID NO: 3622 - protein, 23 aa, Homo sapiens
PLFIPVAVMVTAFSGLAFIIWLA

SEQ ID NO: 3623 - protein, 24 aa, Homo sapiens
ALPAALAVISFLLGLGLGVACVLA

SEQ ID NO: 3624 - protein, 21 aa, Homo sapiens
MALPVTALLLPLALLLHAARP

SEQ ID NO: 3625 - protein, 286 aa, Homo sapiens; identical to SEQ ID NO: 558

SEQ ID NO: 3626 - protein, 226 aa, Homo sapiens; identical to SEQ ID NO: 559

SEQ ID NO: 3627 - protein, 83 aa, Homo sapiens; identical to SEQ ID NO: 560

SEQ ID NO: 3628 - protein, 22 aa, Homo sapiens
IWAPLAGTCGVLLLSLVITLYC

SEQ ID NO: 3629 - protein, 24 aa, Homo sapiens
IYIWAPLAGTCGVLLLSLVITLYC

SEQ ID NO: 3630 - protein, 25 aa, Homo sapiens
IYIWAPLAGTCGVLLLSLVITLYCR

SEQ ID NO: 3631 - protein, 71 aa, Homo sapiens; identical to SEQ ID NO: 564

SEQ ID NO: 3632 - protein, 25 aa, Homo sapiens
IYIWAPLAGTCGVLLLSLVITLVCR

SEQ ID NO: 3633 - protein, 21 aa, Homo sapiens
IYIWAPLAGTCGVLLLSLVIT

SEQ ID NO: 3634 - protein, 23 aa, Homo sapiens
IYIWAPLAGTCGVLLLSLVITLY

SEQ ID NO: 3635 - protein, 101 aa, Homo sapiens; identical to SEQ ID NO: 568

SEQ ID NO: 3636 - protein, 52 aa, Homo sapiens; identical to SEQ ID NO: 569

SEQ ID NO: 3637 - protein, 257 aa, Homo sapiens; identical to SEQ ID NO: 570

SEQ ID NO: 3638 - protein, 244 aa, Homo sapiens; identical to SEQ ID NO: 571

SEQ ID NO: 3639 - protein, 86 aa, Homo sapiens; identical to SEQ ID NO: 524

SEQ ID NO: 3640 - protein, 54 aa, Homo sapiens; identical to SEQ ID NO: 573

SEQ ID NO: 3641 - protein, 31 aa, Homo sapiens; identical to SEQ ID NO: 574

SEQ ID NO: 3642 - protein, 24 aa, Homo sapiens
SIISAVVGILLVVVLGVVFGILII

SEQ ID NO: 3643 - protein, 113 aa, Homo sapiens; identical to SEQ ID NO: 576

SEQ ID NO: 3644 - protein, 21 aa, Homo sapiens
FLVIIVILSALFLGTLACFCV

SEQ ID NO: 3645 - protein, 68 aa, Homo sapiens; identical to SEQ ID NO: 578

SEQ ID NO: 3646 - protein, 106 aa, Homo sapiens; identical to SEQ ID NO: 579

SEQ ID NO: 3647 - protein, 28 aa, Homo sapiens
FWVLVVVGGVLACYSLLVTVAFIIFWVR

SEQ ID NO: 3648 - protein, 73 aa, Homo sapiens; identical to SEQ ID NO: 581

SEQ ID NO: 3649 - protein, 23 aa, Homo sapiens
LGLLVAGVLVLLVSLGVAIHLCC

SEQ ID NO: 3650 - protein, 27 aa, Homo sapiens
ILLAGLVAADAVASLLIVGAVFLCARR

SEQ ID NO: 3651 - protein, 21 aa, Homo sapiens
FWLPIGCAAFVVVCILGCILI

SEQ ID NO: 3652 - protein, 233 aa, Homo sapiens; identical to SEQ ID NO: 585

SEQ ID NO: 3653 - protein, 21 aa, Homo sapiens
LLFLILGVLSLLLLVTGAFGF

SEQ ID NO: 3654 - protein, 21 aa, Homo sapiens
VAAILGLGLVLGLLGPLAILL

SEQ ID NO: 3655 - protein, 20 aa, Homo sapiens
VGWGGLLGSLVLLVWVLAVI

SEQ ID NO: 3656 - protein, 27 aa, Homo sapiens
FWALVVVAGVLFCYGLLVTVALCVIWT

SEQ ID NO: 3657 - protein, 449 aa, synthetic construct; identical to SEQ ID NO: 199
  REGION 1..449: note = Description of Artificial Sequence: Synthetic heavy chain variable domain

SEQ ID NO: 3658 - protein, 223 aa, synthetic construct; identical to SEQ ID NO: 200
  REGION 1..223: note = Description of Artificial Sequence: Synthetic heavy chain variable domain

SEQ ID NO: 3659 - protein, 234 aa, synthetic construct; identical to SEQ ID NO: 201
  REGION 1..234: note = Description of Artificial Sequence: Synthetic heavy chain variable domain

SEQ ID NO: 3660 - protein, 460 aa, synthetic construct; identical to SEQ ID NO: 202
  REGION 1..460: note = Description of Artificial Sequence: Synthetic heavy chain variable domain

SEQ ID NO: 3661 - protein, 241 aa, synthetic construct; identical to SEQ ID NO: 203
  REGION 1..241: note = Description of Artificial Sequence: Synthetic heavy chain variable domain

SEQ ID NO: 3662 - protein, 471 aa, synthetic construct; identical to SEQ ID NO: 204
  REGION 1..471: note = Description of Artificial Sequence: Synthetic heavy chain variable domain

SEQ ID NO: 3663 - protein, 120 aa, synthetic construct; identical to SEQ ID NO: 205
  REGION 1..120: note = Description of Artificial Sequence: Synthetic heavy chain variable domain

SEQ ID NO: 3664 - protein, 111 aa, synthetic construct; identical to SEQ ID NO: 206
  REGION 1..111: note = Description of Artificial Sequence: Synthetic heavy chain variable domain

SEQ ID NO: 3665 - protein, 464 aa, synthetic construct; identical to SEQ ID NO: 207
  REGION 1..464: note = Description of Artificial Sequence: Synthetic heavy chain variable domain

SEQ ID NO: 3666 - protein, 137 aa, synthetic construct; identical to SEQ ID NO: 208
  REGION 1..137: note = Description of Artificial Sequence: Synthetic heavy chain variable domain

SEQ ID NO: 3667 - protein, 124 aa, synthetic construct; identical to SEQ ID NO: 209
  REGION 1..124: note = Description of Artificial Sequence: Synthetic heavy chain variable domain

SEQ ID NO: 3668 - protein, 130 aa, synthetic construct; identical to SEQ ID NO: 210
  REGION 1..130: note = Description of Artificial Sequence: Synthetic heavy chain variable domain

SEQ ID NO: 3669 - protein, 125 aa, synthetic construct; identical to SEQ ID NO: 211
  REGION 1..125: note = Description of Artificial Sequence: Synthetic heavy chain variable domain

SEQ ID NO: 3670 - protein, 125 aa, synthetic construct; identical to SEQ ID NO: 212
  REGION 1..125: note = Description of Artificial Sequence: Synthetic heavy chain variable domain

SEQ ID NO: 3671 - protein, 228 aa, synthetic construct; identical to SEQ ID NO: 213
  REGION 1..228: note = Description of Artificial Sequence: Synthetic heavy chain variable domain

SEQ ID NO: 3672 - protein, 98 aa, synthetic construct; identical to SEQ ID NO: 214
  REGION 1..98: note = Description of Artificial Sequence: Synthetic heavy chain variable domain
  MOD_RES 64..65: note = Any amino acid
  MOD_RES 68..69: note = Any amino acid
  MOD_RES 93: note = Any amino acid
  MOD_RES 98: note = Any amino acid

SEQ ID NO: 3673 - protein, 125 aa, synthetic construct; identical to SEQ ID NO: 215
  REGION 1..125: note = Description of Artificial Sequence: Synthetic heavy chain variable domain
  MOD_RES 76: note = Any amino acid

SEQ ID NO: 3674 - protein, 125 aa, synthetic construct; identical to SEQ ID NO: 216
  REGION 1..125: note = Description of Artificial Sequence: Synthetic heavy chain variable domain

SEQ ID NO: 3675 - protein, 125 aa, synthetic construct; identical to SEQ ID NO: 217
  REGION 1..125: note = Description of Artificial Sequence: Synthetic heavy chain variable domain

SEQ ID NO: 3676 - protein, 125 aa, synthetic construct; identical to SEQ ID NO: 218
  REGION 1..125: note = Description of Artificial Sequence: Synthetic heavy chain variable domain

SEQ ID NO: 3677 - protein, 125 aa, synthetic construct; identical to SEQ ID NO: 219
  REGION 1..125: note = Description of Artificial Sequence: Synthetic heavy chain variable domain

SEQ ID NO: 3678 - protein, 125 aa, synthetic construct; identical to SEQ ID NO: 220
  REGION 1..125: note = Description of Artificial Sequence: Synthetic heavy chain variable domain

SEQ ID NO: 3679 - protein, 125 aa, synthetic construct; identical to SEQ ID NO: 221
  REGION 1..125: note = Description of Artificial Sequence: Synthetic heavy chain variable domain

SEQ ID NO: 3680 - protein, 464 aa, synthetic construct; identical to SEQ ID NO: 207
  REGION 1..464: note = Description of Artificial Sequence: Synthetic heavy chain variable domain

SEQ ID NO: 3681 - protein, 120 aa, synthetic construct; identical to SEQ ID NO: 205
  REGION 1..120: note = Description of Artificial Sequence: Synthetic heavy chain variable domain

SEQ ID NO: 3682 - protein, 218 aa, synthetic construct; identical to SEQ ID NO: 224
  REGION 1..218: note = Description of Artificial Sequence: Synthetic heavy chain variable domain

SEQ ID NO: 3683 - protein, 219 aa, synthetic construct; identical to SEQ ID NO: 225
  REGION 1..219: note = Description of Artificial Sequence: Synthetic heavy chain variable domain

SEQ ID NO: 3684 - protein, 460 aa, synthetic construct; identical to SEQ ID NO: 202
  REGION 1..460: note = Description of Artificial Sequence: Synthetic heavy chain variable domain

SEQ ID NO: 3685 - protein, 242 aa, synthetic construct; identical to SEQ ID NO: 227
  REGION 1..242: note = Description of Artificial Sequence: Synthetic heavy chain variable domain

SEQ ID NO: 3686 - protein, 471 aa, synthetic construct; identical to SEQ ID NO: 204
  REGION 1..471: note = Description of Artificial Sequence: Synthetic heavy chain variable domain

SEQ ID NO: 3687 - protein, 118 aa, synthetic construct; identical to SEQ ID NO: 229
  REGION 1..118: note = Description of Artificial Sequence: Synthetic heavy chain variable domain

SEQ ID NO: 3688 - protein, 119 aa, synthetic construct; identical to SEQ ID NO: 230
  REGION 1..119: note = Description of Artificial Sequence: Synthetic heavy chain variable domain

SEQ ID NO: 3689 - protein, 112 aa, synthetic construct; identical to SEQ ID NO: 231
  REGION 1..112: note = Description of Artificial Sequence: Synthetic light chain variable domain

SEQ ID NO: 3690 - protein, 447 aa, synthetic construct; identical to SEQ ID NO: 232
  REGION 1..447: note = Description of Artificial Sequence: Synthetic light chain variable domain

SEQ ID NO: 3691 - protein, 111 aa, synthetic construct; identical to SEQ ID NO: 233
  REGION 1..111: note = Description of Artificial Sequence: Synthetic light chain variable domain

SEQ ID NO: 3692 - protein, 107 aa, synthetic construct; identical to SEQ ID NO: 234
  REGION 1..107: note = Description of Artificial Sequence: Synthetic light chain variable domain

SEQ ID NO: 3693 - protein, 214 aa, synthetic construct; identical to SEQ ID NO: 235
  REGION 1..214: note = Description of Artificial Sequence: Synthetic light chain variable domain

SEQ ID NO: 3694 - protein, 237 aa, synthetic construct; identical to SEQ ID NO: 236
  REGION 1..237: note = Description of Artificial Sequence: Synthetic light chain variable domain

SEQ ID NO: 3695 - protein, 107 aa, synthetic construct; identical to SEQ ID NO: 237
  REGION 1..107: note = Description of Artificial Sequence: Synthetic light chain variable domain

SEQ ID NO: 3696 - protein, 107 aa, synthetic construct; identical to SEQ ID NO: 237
  REGION 1..107: note = Description of Artificial Sequence: Synthetic light chain variable domain

SEQ ID NO: 3697 - protein, 115 aa, synthetic construct; identical to SEQ ID NO: 239
  REGION 1..115: note = Description of Artificial Sequence: Synthetic light chain variable domain

SEQ ID NO: 3698 - protein, 107 aa, synthetic construct; identical to SEQ ID NO: 237
  REGION 1..107: note = Description of Artificial Sequence: Synthetic light chain variable domain

SEQ ID NO: 3699 - protein, 112 aa, synthetic construct; identical to SEQ ID NO: 241
  REGION 1..112: note = Description of Artificial Sequence: Synthetic light chain variable domain

SEQ ID NO: 3700 - protein, 106 aa, synthetic construct; identical to SEQ ID NO: 242
  REGION 1..106: note = Description of Artificial Sequence: Synthetic light chain variable domain

SEQ ID NO: 3701 - protein, 106 aa, synthetic construct; identical to SEQ ID NO: 243
  REGION 1..106: note = Description of Artificial Sequence: Synthetic light chain variable domain

SEQ ID NO: 3702 - protein, 110 aa, synthetic construct; identical to SEQ ID NO: 244
  REGION 1..110: note = Description of Artificial Sequence: Synthetic light chain variable domain

SEQ ID NO: 3703 - protein, 109 aa, synthetic construct; identical to SEQ ID NO: 245
  REGION 1..109: note = Description of Artificial Sequence: Synthetic light chain variable domain

SEQ ID NO: 3704 - protein, 108 aa, synthetic construct; identical to SEQ ID NO: 246
  REGION 1..108: note = Description of Artificial Sequence: Synthetic light chain variable domain

SEQ ID NO: 3705 - protein, 107 aa, synthetic construct; identical to SEQ ID NO: 247
  REGION 1..107: note = Description of Artificial Sequence: Synthetic light chain variable domain

SEQ ID NO: 3706 - protein, 109 aa, synthetic construct; identical to SEQ ID NO: 248
  REGION 1..109: note = Description of Artificial Sequence: Synthetic light chain variable domain

SEQ ID NO: 3707 - protein, 109 aa, synthetic construct; identical to SEQ ID NO: 249
  REGION 1..109: note = Description of Artificial Sequence: Synthetic light chain variable domain

SEQ ID NO: 3708 - protein, 111 aa, synthetic construct; identical to SEQ ID NO: 250
  REGION 1..111: note = Description of Artificial Sequence: Synthetic light chain variable domain

SEQ ID NO: 3709 - protein, 109 aa, synthetic construct; identical to SEQ ID NO: 251
  REGION 1..109: note = Description of Artificial Sequence: Synthetic light chain variable domain
  MOD_RES 5..6: note = Any amino acid
  MOD_RES 8..9: note = Any amino acid
  MOD_RES 93: note = Any amino acid
  MOD_RES 104: note = Any amino acid

SEQ ID NO: 3710 - protein, 112 aa, synthetic construct; identical to SEQ ID NO: 252
  REGION 1..112: note = Description of Artificial Sequence: Synthetic light chain variable domain
  MOD_RES 61: note = Any amino acid

SEQ ID NO: 3711 - protein, 112 aa, synthetic construct; identical to SEQ ID NO: 253
  REGION 1..112: note = Description of Artificial Sequence: Synthetic light chain variable domain

SEQ ID NO: 3712 - protein, 110 aa, synthetic construct; identical to SEQ ID NO: 254
  REGION 1..110: note = Description of Artificial Sequence: Synthetic light chain variable domain

SEQ ID NO: 3713 - protein, 112 aa, synthetic construct; identical to SEQ ID NO: 255
  REGION 1..112: note = Description of Artificial Sequence: Synthetic light chain variable domain

SEQ ID NO: 3714 - protein, 111 aa, synthetic construct; identical to SEQ ID NO: 256
  REGION 1..111: note = Description of Artificial Sequence: Synthetic light chain variable domain

SEQ ID NO: 3715 - protein, 111 aa, synthetic construct; identical to SEQ ID NO: 257
  REGION 1..111: note = Description of Artificial Sequence: Synthetic light chain variable domain

SEQ ID NO: 3716 - protein, 106 aa, synthetic construct; identical to SEQ ID NO: 258
  REGION 1..106: note = Description of Artificial Sequence: Synthetic light chain variable domain

SEQ ID NO: 3717 - protein, 99 aa, synthetic construct; identical to SEQ ID NO: 259
  REGION 1..99: note = Description of Artificial Sequence: Synthetic light chain variable domain

SEQ ID NO: 3718 - protein, 110 aa, synthetic construct; identical to SEQ ID NO: 260
  REGION 1..110: note = Description of Artificial Sequence: Synthetic light chain variable domain

SEQ ID NO: 3719 - protein, 111 aa, synthetic construct; identical to SEQ ID NO: 261
  REGION 1..111: note = Description of Artificial Sequence: Synthetic light chain variable domain

SEQ ID NO: 3720 - protein, 124 aa, synthetic construct; identical to SEQ ID NO: 262
  REGION 1..124: note = Description of Artificial Sequence: Synthetic light chain variable domain

SEQ ID NO: 3721 - protein, 239 aa, synthetic construct; identical to SEQ ID NO: 263
  REGION 1..239: note = Description of Artificial Sequence: Synthetic light chain variable domain

SEQ ID NO: 3722 - protein, 111 aa, synthetic construct; identical to SEQ ID NO: 264
  REGION 1..111: note = Description of Artificial Sequence: Synthetic light chain variable domain

SEQ ID NO: 3723 - protein, 110 aa, synthetic construct; identical to SEQ ID NO: 265
  REGION 1..110: note = Description of Artificial Sequence: Synthetic light chain variable domain

SEQ ID NO: 3724 - protein, 111 aa, synthetic construct; identical to SEQ ID NO: 266
  REGION 1..111: note = Description of Artificial Sequence: Synthetic light chain variable domain

SEQ ID NO: 3725 - protein, 109 aa, synthetic construct; identical to SEQ ID NO: 267
  REGION 1..109: note = Description of Artificial Sequence: Synthetic light chain variable domain

SEQ ID NO: 3726 - protein, 108 aa, synthetic construct; identical to SEQ ID NO: 268
  REGION 1..108: note = Description of Artificial Sequence: Synthetic light chain variable domain

SEQ ID NO: 3727 - protein, 107 aa, synthetic construct; identical to SEQ ID NO: 269
  REGION 1..107: note = Description of Artificial Sequence: Synthetic light chain variable domain

SEQ ID NO: 3728 - protein, 109 aa, synthetic construct; identical to SEQ ID NO: 270
  REGION 1..109: note = Description of Artificial Sequence: Synthetic light chain variable domain

SEQ ID NO: 3729 - protein, 111 aa, synthetic construct; identical to SEQ ID NO: 271
  REGION 1..111: note = Description of Artificial Sequence: Synthetic light chain variable domain

SEQ ID NO: 3730 - protein, 121 aa, synthetic construct; identical to SEQ ID NO: 272
  REGION 1..121: note = Description of Artificial Sequence: Synthetic light chain variable domain

SEQ ID NO: 3731 - protein, 263 aa, synthetic construct; identical to SEQ ID NO: 273
  REGION 1..263: note = Description of Artificial Sequence: Synthetic single chain variable fragment

SEQ ID NO: 3732 - protein, 247 aa, synthetic construct; identical to SEQ ID NO: 274
  REGION 1..247: note = Description of Artificial Sequence: Synthetic single chain variable fragment

SEQ ID NO: 3733 - protein, 242 aa, synthetic construct; identical to SEQ ID NO: 275
  REGION 1..242: note = Description of Artificial Sequence: Synthetic single chain variable fragment

SEQ ID NO: 3734 - protein, 247 aa, synthetic construct; identical to SEQ ID NO: 276
  REGION 1..247: note = Description of Artificial Sequence: Synthetic single chain variable fragment

SEQ ID NO: 3735 - protein, 248 aa, synthetic construct; identical to SEQ ID NO: 277
  REGION 1..248: note = Description of Artificial Sequence: Synthetic single chain variable fragment

SEQ ID NO: 3736 - protein, 242 aa, synthetic construct; identical to SEQ ID NO: 278
  REGION 1..242: note = Description of Artificial Sequence: Synthetic single chain variable fragment

SEQ ID NO: 3737 - protein, 242 aa, synthetic construct; identical to SEQ ID NO: 279
  REGION 1..242: note = Description of Artificial Sequence: Synthetic single chain variable fragment

SEQ ID NO: 3738 - protein, 242 aa, synthetic construct; identical to SEQ ID NO: 280
  REGION 1..242: note = Description of Artificial Sequence: Synthetic single chain variable fragment

SEQ ID NO: 3739 - protein, 246 aa, synthetic construct; identical to SEQ ID NO: 281
  REGION 1..246: note = Description of Artificial Sequence: Synthetic single chain variable fragment

SEQ ID NO: 3740 - protein, 252 aa, synthetic construct; identical to SEQ ID NO: 282
  REGION 1..252: note = Description of Artificial Sequence: Synthetic single chain variable fragment

SEQ ID NO: 3741 - protein, 249 aa, synthetic construct; identical to SEQ ID NO: 283
  REGION 1..249: note = Description of Artificial Sequence: Synthetic single chain variable fragment

SEQ ID NO: 3742 - protein, 249 aa, synthetic construct; identical to SEQ ID NO: 284
  REGION 1..249: note = Description of Artificial Sequence: Synthetic single chain variable fragment

SEQ ID NO: 3743 - protein, 251 aa, synthetic construct; identical to SEQ ID NO: 285
  REGION 1..251: note = Description of Artificial Sequence: Synthetic single chain variable fragment

SEQ ID NO: 3744 - protein, 252 aa, synthetic construct; identical to SEQ ID NO: 286
  REGION 1..252: note = Description of Artificial Sequence: Synthetic single chain variable fragment

SEQ ID NO: 3745 - protein, 252 aa, synthetic construct; identical to SEQ ID NO: 286
  REGION 1..252: note = Description of Artificial Sequence: Synthetic single chain variable fragment

SEQ ID NO: 3746 - protein, 252 aa, synthetic construct; identical to SEQ ID NO: 288
  REGION 1..252: note = Description of Artificial Sequence: Synthetic single chain variable fragment

SEQ ID NO: 3747 - protein, 252 aa, synthetic construct; identical to SEQ ID NO: 288
  REGION 1..252: note = Description of Artificial Sequence: Synthetic single chain variable fragment

SEQ ID NO: 3748 - protein, 252 aa, synthetic construct; identical to SEQ ID NO: 288
  REGION 1..252: note = Description of Artificial Sequence: Synthetic single chain variable fragment

SEQ ID NO: 3749 - protein, 252 aa, synthetic construct; identical to SEQ ID NO: 291
  REGION 1..252: note = Description of Artificial Sequence: Synthetic single chain variable fragment
  MOD_RES 76: note = Any amino acid
  MOD_RES 201: note = Any amino acid

SEQ ID NO: 3750 - protein, 252 aa, synthetic construct; identical to SEQ ID NO: 286
  REGION 1..252: note = Description of Artificial Sequence: Synthetic single chain variable fragment

SEQ ID NO: 3751 - protein, 250 aa, synthetic construct; identical to SEQ ID NO: 293
  REGION 1..250: note = Description of Artificial Sequence: Synthetic single chain variable fragment

SEQ ID NO: 3752 - protein, 252 aa, synthetic construct; identical to SEQ ID NO: 294
  REGION 1..252: note = Description of Artificial Sequence: Synthetic single chain variable fragment

SEQ ID NO: 3753 - protein, 236 aa, synthetic construct; identical to SEQ ID NO: 295
  REGION 1..236: note = Description of Artificial Sequence: Synthetic single chain variable fragment

SEQ ID NO: 3754 - protein, 251 aa, synthetic construct; identical to SEQ ID NO: 296
  REGION 1..251: note = Description of Artificial Sequence: Synthetic single chain variable fragment

SEQ ID NO: 3755 - protein, 246 aa, synthetic construct; identical to SEQ ID NO: 297
  REGION 1..246: note = Description of Artificial Sequence: Synthetic single chain variable fragment

SEQ ID NO: 3756 - protein, 239 aa, synthetic construct; identical to SEQ ID NO: 298
  REGION 1..239: note = Description of Artificial Sequence: Synthetic single chain variable fragment

SEQ ID NO: 3757 - protein, 250 aa, synthetic construct; identical to SEQ ID NO: 299
  REGION 1..250: note = Description of Artificial Sequence: Synthetic single chain variable fragment

SEQ ID NO: 3758 - protein, 251 aa, synthetic construct; identical to SEQ ID NO: 300
  REGION 1..251: note = Description of Artificial Sequence: Synthetic single chain variable fragment

SEQ ID NO: 3759 - protein, 242 aa, synthetic construct; identical to SEQ ID NO: 301
  REGION 1..242: note = Description of Artificial Sequence: Synthetic single chain variable fragment

SEQ ID NO: 3760 - protein, 242 aa, synthetic construct; identical to SEQ ID NO: 302
  REGION 1..242: note = Description of Artificial Sequence: Synthetic single chain variable fragment

SEQ ID NO: 3761 - protein, 246 aa, synthetic construct; identical to SEQ ID NO: 303
  REGION 1..246: note = Description of Artificial Sequence: Synthetic single chain variable fragment

SEQ ID NO: 3762 - protein, 249 aa, synthetic construct; identical to SEQ ID NO: 304
  REGION 1..249: note = Description of Artificial Sequence: Synthetic single chain variable fragment

SEQ ID NO: 3763 - protein, 249 aa, synthetic construct; identical to SEQ ID NO: 305
  REGION 1..249: note = Description of Artificial Sequence: Synthetic single chain variable fragment

SEQ ID NO: 3764 - protein, 252 aa, synthetic construct; identical to SEQ ID NO: 288
  REGION 1..252: note = Description of Artificial Sequence: Synthetic single chain variable fragment

SEQ ID NO: 3765 - protein, 495 aa, synthetic construct; identical to SEQ ID NO: 307
  REGION 1..495: note = Description of Artificial Sequence: Synthetic single chain variable fragment

SEQ ID NO: 3766 - protein, 247 aa, synthetic construct; identical to SEQ ID NO: 308
  REGION 1..247: note = Description of Artificial Sequence: Synthetic single chain variable fragment

SEQ ID NO: 3767 - protein, 251 aa, synthetic construct; identical to SEQ ID NO: 309
  REGION 1..251: note = Description of Artificial Sequence: Synthetic single chain variable fragment

SEQ ID NO: 3768 - protein, 250 aa, synthetic construct; identical to SEQ ID NO: 310
  REGION 1..250: note = Description of Artificial Sequence: Synthetic single chain variable fragment

SEQ ID NO: 3769 - protein, 247 aa, synthetic construct; identical to SEQ ID NO: 311
  REGION 1..247: note = Description of Artificial Sequence: Synthetic single chain variable fragment

SEQ ID NO: 3770 - protein, 248 aa, synthetic construct; identical to SEQ ID NO: 312
  REGION 1..248: note = Description of Artificial Sequence: Synthetic single chain variable fragment

SEQ ID NO: 3771 - protein, 242 aa, synthetic construct; identical to SEQ ID NO: 313
  REGION 1..242: note = Description of Artificial Sequence: Synthetic single chain variable fragment

SEQ ID NO: 3772 - protein, 251 aa, synthetic construct; identical to SEQ ID NO: 314
  REGION 1..251: note = Description of Artificial Sequence: Synthetic single chain variable fragment

SEQ ID NO: 3773 - protein, 247 aa, synthetic construct; identical to SEQ ID NO: 315
  REGION 1..247: note = Description of Artificial Sequence: Synthetic single chain variable fragment

SEQ ID NO: 3774 - protein, 250 aa, synthetic construct; identical to SEQ ID NO: 316
  REGION 1..250: note = Description of Artificial Sequence: Synthetic single chain variable fragment

SEQ ID NO: 3775 - protein, 252 aa, synthetic construct; identical to SEQ ID NO: 317
  REGION 1..252: note = Description of Artificial Sequence: Synthetic single chain variable fragment

SEQ ID NO: 3776 - protein, 247 aa, synthetic construct; identical to SEQ ID NO: 318
  REGION 1..247: note = Description of Artificial Sequence: Synthetic single chain variable fragment

SEQ ID NO: 3777 - protein, 247 aa, synthetic construct; identical to SEQ ID NO: 319
  REGION 1..247: note = Description of Artificial Sequence: Synthetic single chain variable fragment

SEQ ID NO: 3778 - protein, 249 aa, synthetic construct; identical to SEQ ID NO: 320
  REGION 1..249: note = Description of Artificial Sequence: Synthetic single chain variable fragment

SEQ ID NO: 3779 - protein, 251 aa, synthetic construct; identical to SEQ ID NO: 321
  REGION 1..251: note = Description of Artificial Sequence: Synthetic single chain variable fragment

SEQ ID NO: 3780 - protein, 247 aa, synthetic construct; identical to SEQ ID NO: 322
  REGION 1..247: note = Description of Artificial Sequence: Synthetic single chain variable fragment

SEQ ID NO: 3781 - protein, 241 aa, synthetic construct; identical to SEQ ID NO: 323
  REGION 1..241: note = Description of Artificial Sequence: Synthetic single chain variable fragment

SEQ ID NO: 3782 - protein, 248 aa, synthetic construct; identical to SEQ ID NO: 277
  REGION 1..248: note = Description of Artificial Sequence: Synthetic single chain variable fragment

SEQ ID NO: 3783 - protein, 246 aa, synthetic construct; identical to SEQ ID NO: 281
  REGION 1..246: note = Description of Artificial Sequence: Synthetic single chain variable fragment

SEQ ID NO: 3784 - protein, 252 aa, synthetic construct; identical to SEQ ID NO: 282
  REGION 1..252: note = Description of Artificial Sequence: Synthetic single chain variable fragment

SEQ ID NO: 3785 - protein, 249 aa, synthetic construct; identical to SEQ ID NO: 283
  REGION 1..249: note = Description of Artificial Sequence: Synthetic single chain variable fragment

SEQ ID NO: 3786 - protein, 249 aa, synthetic construct; identical to SEQ ID NO: 284
  REGION 1..249: note = Description of Artificial Sequence: Synthetic single chain variable fragment

SEQ ID NO: 3787 - protein, 251 aa, synthetic construct; identical to SEQ ID NO: 285
  REGION 1..251: note = Description of Artificial Sequence: Synthetic single chain variable fragment

SEQ ID NO: 3788 - protein, 252 aa, synthetic construct; identical to SEQ ID NO: 286
  REGION 1..252: note = Description of Artificial Sequence: Synthetic single chain variable fragment

SEQ ID NO: 3789 - protein, 252 aa, synthetic construct; identical to SEQ ID NO: 286
  REGION 1..252: note = Description of Artificial Sequence: Synthetic single chain variable fragment

SEQ ID NO: 3790 - protein, 249 aa, synthetic construct; identical to SEQ ID NO: 332
  REGION 1..249: note = Description of Artificial Sequence: Synthetic single chain variable fragment
  MOD_RES 64..65: note = Any amino acid
  MOD_RES 68..69: note = Any amino acid
  MOD_RES 93: note = Any amino acid
  MOD_RES 98: note = Any amino acid
  MOD_RES 102: note = Any amino acid
  MOD_RES 104: note = Any amino acid
  MOD_RES 113: note = Any amino acid
  MOD_RES 145..146: note = Any amino acid
  MOD_RES 148..149: note = Any amino acid
  MOD_RES 233: note = Any amino acid
  MOD_RES 244: note = Any amino acid

SEQ ID NO: 3791 - protein, 252 aa, synthetic construct; identical to SEQ ID NO: 288
  REGION 1..252: note = Description of Artificial Sequence: Synthetic single chain variable fragment

SEQ ID NO: 3792 - protein, 252 aa, synthetic construct; identical to SEQ ID NO: 288
  REGION 1..252: note = Description of Artificial Sequence: Synthetic single chain variable fragment

SEQ ID NO: 3793 - protein, 252 aa, synthetic construct; identical to SEQ ID NO: 288
  REGION 1..252: note = Description of Artificial Sequence: Synthetic single chain variable fragment

SEQ ID NO: 3794 - protein, 252 aa, synthetic construct; identical to SEQ ID NO: 291
  REGION 1..252: note = Description of Artificial Sequence: Synthetic single chain variable fragment
  MOD_RES 76: note = Any amino acid
  MOD_RES 201: note = Any amino acid

SEQ ID NO: 3795 - protein, 252 aa, synthetic construct; identical to SEQ ID NO: 286
  REGION 1..252: note = Description of Artificial Sequence: Synthetic single chain variable fragment

SEQ ID NO: 3796 - protein, 250 aa, synthetic construct; identical to SEQ ID NO: 293
  REGION 1..250: note = Description of Artificial Sequence: Synthetic single chain variable fragment

SEQ ID NO: 3797 - protein, 252 aa, synthetic construct; identical to SEQ ID NO: 294
  REGION 1..252: note = Description of Artificial Sequence: Synthetic single chain variable fragment

SEQ ID NO: 3798 - protein, 236 aa, synthetic construct; identical to SEQ ID NO: 295
  REGION 1..236: note = Description of Artificial Sequence: Synthetic single chain variable fragment

SEQ ID NO: 3799 - protein, 251 aa, synthetic construct; identical to SEQ ID NO: 296
  REGION 1..251: note = Description of Artificial Sequence: Synthetic single chain variable fragment

SEQ ID NO: 3800 - protein, 246 aa, synthetic construct; identical to SEQ ID NO: 297
  REGION 1..246: note = Description of Artificial Sequence: Synthetic single chain variable fragment

SEQ ID NO: 3801 - protein, 239 aa, synthetic construct; identical to SEQ ID NO: 298
  REGION 1..239: note = Description of Artificial Sequence: Synthetic single chain variable fragment

SEQ ID NO: 3802 - protein, 250 aa, synthetic construct; identical to SEQ ID NO: 299
  REGION 1..250: note = Description of Artificial Sequence: Synthetic single chain variable fragment

SEQ ID NO: 3803 - protein, 251 aa, synthetic construct; identical to SEQ ID NO: 300
  REGION 1..251: note = Description of Artificial Sequence: Synthetic single chain variable fragment

SEQ ID NO: 3804 - protein, 273 aa, synthetic construct; identical to SEQ ID NO: 346
  REGION 1..273: note = Description of Artificial Sequence: Synthetic single chain variable fragment

SEQ ID NO: 3805 - protein, 270 aa, synthetic construct; identical to SEQ ID NO: 347
  REGION 1..270: note = Description of Artificial Sequence: Synthetic single chain variable fragment

SEQ ID NO: 3806 - protein, 277 aa, synthetic construct; identical to SEQ ID NO: 348
  REGION 1..277: note = Description of Artificial Sequence: Synthetic single chain variable fragment

SEQ ID NO: 3807 - protein, 246 aa, synthetic construct; identical to SEQ ID NO: 303
  REGION 1..246: note = Description of Artificial Sequence: Synthetic single chain variable fragment

SEQ ID NO: 3808 - protein, 249 aa, synthetic construct; identical to SEQ ID NO: 304
  REGION 1..249: note = Description of Artificial Sequence: Synthetic single chain variable fragment

SEQ ID NO: 3809 - protein, 249 aa, synthetic construct; identical to SEQ ID NO: 305
  REGION 1..249: note = Description of Artificial Sequence: Synthetic single chain variable fragment

SEQ ID NO: 3810 - protein, 252 aa, synthetic construct; identical to SEQ ID NO: 288
  REGION 1..252: note = Description of Artificial Sequence: Synthetic single chain variable fragment

SEQ ID NO: 3811 - protein, 251 aa, synthetic construct; identical to SEQ ID NO: 309
  REGION 1..251: note = Description of Artificial Sequence: Synthetic single chain variable fragment

SEQ ID NO: 3812 - protein, 250 aa, synthetic construct; identical to SEQ ID NO: 310
  REGION 1..250: note = Description of Artificial Sequence: Synthetic single chain variable fragment

SEQ ID NO: 3813 - protein, 247 aa, synthetic construct; identical to SEQ ID NO: 311
  REGION 1..247: note = Description of Artificial Sequence: Synthetic single chain variable fragment

SEQ ID NO: 3814 - protein, 248 aa, synthetic construct; identical to SEQ ID NO: 312
  REGION 1..248: note = Description of Artificial Sequence: Synthetic single chain variable fragment

SEQ ID NO: 3815 - protein, 251 aa, synthetic construct; identical to SEQ ID NO: 314
  REGION 1..251: note = Description of Artificial Sequence: Synthetic single chain variable fragment

SEQ ID NO: 3816 - protein, 250 aa, synthetic construct; identical to SEQ ID NO: 316
  REGION 1..250: note = Description of Artificial Sequence: Synthetic single chain variable fragment

SEQ ID NO: 3817 - protein, 249 aa, synthetic construct; identical to SEQ ID NO: 320
  REGION 1..249: note = Description of Artificial Sequence: Synthetic single chain variable fragment

SEQ ID NO: 3818 - protein, 251 aa, synthetic construct; identical to SEQ ID NO: 321
  REGION 1..251: note = Description of Artificial Sequence: Synthetic single chain variable fragment

SEQ ID NO: 3819 - protein, 249 aa, synthetic construct; identical to SEQ ID NO: 284
  REGION 1..249: note = Description of Artificial Sequence: Synthetic single chain variable fragment

SEQ ID NO: 3820 - protein, 242 aa, synthetic construct; identical to SEQ ID NO: 275
  REGION 1..242: note = Description of Artificial Sequence: Synthetic single chain variable fragment

SEQ ID NO: 3821 - protein, 245 aa, synthetic construct; identical to SEQ ID NO: 363
  REGION 1..245: note = Description of Artificial Sequence: Synthetic single chain variable fragment

SEQ ID NO: 3822 - protein, 119 aa, synthetic construct; identical to SEQ ID NO: 364
  REGION 1..119: note = Description of Artificial Sequence: Synthetic single chain variable fragment

SEQ ID NO: 3823 - protein, 438 aa, synthetic construct; identical to SEQ ID NO: 365
  REGION 1..438: note = Description of Artificial Sequence: Synthetic single chain variable fragment

SEQ ID NO: 3824 - protein, 272 aa, synthetic construct; identical to SEQ ID NO: 366
  REGION 1..272: note = Description of Artificial Sequence: Synthetic single chain variable fragment

SEQ ID NO: 3825 - protein, 267 aa, synthetic construct; identical to SEQ ID NO: 367
  REGION 1..267: note = Description of Artificial Sequence: Synthetic single chain variable fragment

SEQ ID NO: 3826 - protein, 270 aa, synthetic construct; identical to SEQ ID NO: 347
  REGION 1..270: note = Description of Artificial Sequence: Synthetic single chain variable fragment

SEQ ID NO: 3827 - protein, 277 aa, synthetic construct; identical to SEQ ID NO: 348
  REGION 1..277: note = Description of Artificial Sequence: Synthetic single chain variable fragment

SEQ ID NO: 3828 - protein, 242 aa, synthetic construct; identical to SEQ ID NO: 280
  REGION 1..242: note = Description of Artificial Sequence: Synthetic single chain variable fragment

SEQ ID NO: 3829 - protein, 242 aa, synthetic construct; identical to SEQ ID NO: 301
  REGION 1..242: note = Description of Artificial Sequence: Synthetic single chain variable fragment

SEQ ID NO: 3830 - protein, 242 aa, synthetic construct; identical to SEQ ID NO: 302
  REGION 1..242: note = Description of Artificial Sequence: Synthetic single chain variable fragment

SEQ ID NO: 3831 - protein, 247 aa, synthetic construct; identical to SEQ ID NO: 308
  REGION 1..247: note = Description of Artificial Sequence: Synthetic single chain variable fragment

SEQ ID NO: 3832 - protein, 247 aa, synthetic construct; identical to SEQ ID NO: 315
  REGION 1..247: note = Description of Artificial Sequence: Synthetic single chain variable fragment

SEQ ID NO: 3833 - protein, 247 aa, synthetic construct; identical to SEQ ID NO: 318
  REGION 1..247: note = Description of Artificial Sequence: Synthetic single chain variable fragment

SEQ ID NO: 3834 - protein, 247 aa, synthetic construct; identical to SEQ ID NO: 319
  REGION 1..247: note = Description of Artificial Sequence: Synthetic single chain variable fragment

SEQ ID NO: 3835 - protein, 247 aa, synthetic construct; identical to SEQ ID NO: 322
  REGION 1..247: note = Description of Artificial Sequence: Synthetic single chain variable fragment

SEQ ID NO: 3836 - protein, 247 aa, synthetic construct; identical to SEQ ID NO: 276
  REGION 1..247: note = Description of Artificial Sequence: Synthetic single chain variable fragment

SEQ ID NO: 3837 - protein, 242 aa, synthetic construct; identical to SEQ ID NO: 278
  REGION 1..242: note = Description of Artificial Sequence: Synthetic single chain variable fragment

SEQ ID NO: 3838 - protein, 495 aa, synthetic construct; identical to SEQ ID NO: 307
  REGION 1..495: note = Description of Artificial Sequence: Synthetic single chain variable fragment

SEQ ID NO: 3839 - protein, 242 aa, synthetic construct; identical to SEQ ID NO: 279
  REGION 1..242: note = Description of Artificial Sequence: Synthetic single chain variable fragment

SEQ ID NO: 3840 - protein, 242 aa, synthetic construct; identical to SEQ ID NO: 313
  REGION 1..242: note = Description of Artificial Sequence: Synthetic single chain variable fragment

SEQ ID NO: 3841 - protein, 252 aa, synthetic construct; identical to SEQ ID NO: 317
  REGION 1..252: note = Description of Artificial Sequence: Synthetic single chain variable fragment

SEQ ID NO: 3842 - protein, 250 aa, synthetic construct; identical to SEQ ID NO: 384
  REGION 1..250: note = Description of Artificial Sequence: Synthetic single chain variable fragment

SEQ ID NO: 3843 - protein, 242 aa, synthetic construct; identical to SEQ ID NO: 313
  REGION 1..242: note = Description of Artificial Sequence: Synthetic single chain variable fragment

SEQ ID NO: 3844 - protein, 251 aa, synthetic construct; identical to SEQ ID NO: 386
  REGION 1..251: note = Description of Artificial Sequence: Synthetic single chain variable fragment

SEQ ID NO: 3845 - protein, 271 aa, synthetic construct; identical to SEQ ID NO: 387
  REGION 1..271: note = Description of Artificial Sequence: Synthetic single chain variable fragment

SEQ ID NO: 3846 - protein, 248 aa, synthetic construct; identical to SEQ ID NO: 277
  REGION 1..248: note = Description of Artificial Sequence: Synthetic single chain variable fragment

SEQ ID NO: 3847 - protein, 246 aa, synthetic construct; identical to SEQ ID NO: 281
  REGION 1..246: note = Description of Artificial Sequence: Synthetic single chain variable fragment

SEQ ID NO: 3848 - protein, 252 aa, synthetic construct; identical to SEQ ID NO: 282
  REGION 1..252: note = Description of Artificial Sequence: Synthetic single chain variable fragment

SEQ ID NO: 3849 - protein, 249 aa, synthetic construct; identical to SEQ ID NO: 283
  REGION 1..249: note = Description of Artificial Sequence: Synthetic single chain variable fragment

SEQ ID NO: 3850 - protein, 251 aa, synthetic construct; identical to SEQ ID NO: 285
  REGION 1..251: note = Description of Artificial Sequence: Synthetic single chain variable fragment

SEQ ID NO: 3851 - protein, 252 aa, synthetic construct; identical to SEQ ID NO: 286
  REGION 1..252: note = Description of Artificial Sequence: Synthetic single chain variable fragment

SEQ ID NO: 3852 - protein, 249 aa, synthetic construct; identical to SEQ ID NO: 332
  REGION 1..249: note = Description of Artificial Sequence: Synthetic single chain variable fragment
  MOD_RES 64..65: note = Any amino acid
  MOD_RES 68..69: note = Any amino acid
  MOD_RES 93: note = Any amino acid
  MOD_RES 98: note = Any amino acid
  MOD_RES 102: note = Any amino acid
  MOD_RES 104: note = Any amino acid
  MOD_RES 113: note = Any amino acid
  MOD_RES 145..146: note = Any amino acid
  MOD_RES 148..149: note = Any amino acid
  MOD_RES 233: note = Any amino acid
  MOD_RES 244: note = Any amino acid

SEQ ID NO: 3853 - protein, 252 aa, synthetic construct; identical to SEQ ID NO: 291
  REGION 1..252: note = Description of Artificial Sequence: Synthetic single chain variable fragment
  MOD_RES 76: note = Any amino acid
  MOD_RES 201: note = Any amino acid

SEQ ID NO: 3854 - protein, 250 aa, synthetic construct; identical to SEQ ID NO: 293
  REGION 1..250: note = Description of Artificial Sequence: Synthetic single chain variable fragment

SEQ ID NO: 3855 - protein, 252 aa, synthetic construct; identical to SEQ ID NO: 294
  REGION 1..252: note = Description of Artificial Sequence: Synthetic single chain variable fragment

SEQ ID NO: 3856 - protein, 236 aa, synthetic construct; identical to SEQ ID NO: 295
  REGION 1..236: note = Description of Artificial Sequence: Synthetic single chain variable fragment

SEQ ID NO: 3857 - protein, 251 aa, synthetic construct; identical to SEQ ID NO: 296
  REGION 1..251: note = Description of Artificial Sequence: Synthetic single chain variable fragment

SEQ ID NO: 3858 - protein, 246 aa, synthetic construct; identical to SEQ ID NO: 297
  REGION 1..246: note = Description of Artificial Sequence: Synthetic single chain variable fragment

SEQ ID NO: 3859 - protein, 239 aa, synthetic construct; identical to SEQ ID NO: 298
  REGION 1..239: note = Description of Artificial Sequence: Synthetic single chain variable fragment

SEQ ID NO: 3860 - protein, 250 aa, synthetic construct; identical to SEQ ID NO: 299
  REGION 1..250: note = Description of Artificial Sequence: Synthetic single chain variable fragment

SEQ ID NO: 3861 - protein, 251 aa, synthetic construct; identical to SEQ ID NO: 300
  REGION 1..251: note = Description of Artificial Sequence: Synthetic single chain variable fragment

SEQ ID NO: 3862 - protein, 246 aa, synthetic construct; identical to SEQ ID NO: 303
  REGION 1..246: note = Description of Artificial Sequence: Synthetic single chain variable fragment

SEQ ID NO: 3863 - protein, 249 aa, synthetic construct; identical to SEQ ID NO: 304
  REGION 1..249: note = Description of Artificial Sequence: Synthetic single chain variable fragment

SEQ ID NO: 3864 - protein, 249 aa, synthetic construct; identical to SEQ ID NO: 305
  REGION 1..249: note = Description of Artificial Sequence: Synthetic single chain variable fragment

SEQ ID NO: 3865 - protein, 252 aa, synthetic construct; identical to SEQ ID NO: 288
  REGION 1..252: note = Description of Artificial Sequence: Synthetic single chain variable fragment

SEQ ID NO: 3866 - protein, 251 aa, synthetic construct; identical to SEQ ID NO: 309
  REGION 1..251: note = Description of Artificial Sequence: Synthetic single chain variable fragment

SEQ ID NO: 3867 - protein, 250 aa, synthetic construct; identical to SEQ ID NO: 310
  REGION 1..250: note = Description of Artificial Sequence: Synthetic single chain variable fragment

SEQ ID NO: 3868 - protein, 247 aa, synthetic construct; identical to SEQ ID NO: 311
  REGION 1..247: note = Description of Artificial Sequence: Synthetic single chain variable fragment

SEQ ID NO: 3869 - protein, 248 aa, synthetic construct; identical to SEQ ID NO: 312
  REGION 1..248: note = Description of Artificial Sequence: Synthetic single chain variable fragment

SEQ ID NO: 3870 - protein, 251 aa, synthetic construct; identical to SEQ ID NO: 314
  REGION 1..251: note = Description of Artificial Sequence: Synthetic single chain variable fragment

SEQ ID NO: 3871 - protein, 250 aa, synthetic construct; identical to SEQ ID NO: 316
  REGION 1..250: note = Description of Artificial Sequence: Synthetic single chain variable fragment

SEQ ID NO: 3872 - protein, 249 aa, synthetic construct; identical to SEQ ID NO: 320
  REGION 1..249: note = Description of Artificial Sequence: Synthetic single chain variable fragment

SEQ ID NO: 3873 - protein, 251 aa, synthetic construct; identical to SEQ ID NO: 321
  REGION 1..251: note = Description of Artificial Sequence: Synthetic single chain variable fragment

SEQ ID NO: 3874 - protein, 249 aa, synthetic construct; identical to SEQ ID NO: 284
  REGION 1..249: note = Description of Artificial Sequence: Synthetic single chain variable fragment

SEQ ID NO: 3875 - protein, 277 aa, synthetic construct; identical to SEQ ID NO: 417
  REGION 1..277: note = Description of Artificial Sequence: Synthetic single chain variable fragment

SEQ ID NO: 3876 - protein, 242 aa, synthetic construct; identical to SEQ ID NO: 313
  REGION 1..242: note = Description of Artificial Sequence: Synthetic CD19 scFv

SEQ ID NO: 3877 - protein, 486 aa, synthetic construct; identical to SEQ ID NO: 669
  REGION 1..486: note = Description of Artificial Sequence: Synthetic Construct

SEQ ID NO: 3878 - protein, 593 aa, synthetic construct; identical to SEQ ID NO: 670
  REGION 1..593: note = Description of Artificial Sequence: Synthetic Construct

SEQ ID NO: 3879 - protein, 644 aa, synthetic construct; identical to SEQ ID NO: 671
  REGION 1..644: note = Description of Artificial Sequence: Synthetic Construct

SEQ ID NO: 3880 - protein, 593 aa, synthetic construct; identical to SEQ ID NO: 672
  REGION 1..593: note = Description of Artificial Sequence: Synthetic Construct

SEQ ID NO: 3881 - protein, 644 aa, synthetic construct; identical to SEQ ID NO: 673
  REGION 1..644: note = Description of Artificial Sequence: Synthetic Construct

SEQ ID NO: 3882 - protein, 649 aa, synthetic construct; identical to SEQ ID NO: 674
  REGION 1..649: note = Description of Artificial Sequence: Synthetic Construct

SEQ ID NO: 3883 - protein, 598 aa, synthetic construct; identical to SEQ ID NO: 675
  REGION 1..598: note = Description of Artificial Sequence: Synthetic Construct

SEQ ID NO: 3884 - protein, 677 aa, synthetic construct; identical to SEQ ID NO: 676
  REGION 1..677: note = Description of Artificial Sequence: Synthetic Construct

SEQ ID NO: 3885 - protein, 677 aa, synthetic construct; identical to SEQ ID NO: 677
  REGION 1..677: note = Description of Artificial Sequence: Synthetic Construct

SEQ ID NO: 3886 - protein, 677 aa, synthetic construct; identical to SEQ ID NO: 678
  REGION 1..677: note = Description of Artificial Sequence: Synthetic Construct

SEQ ID NO: 3887 - protein, 677 aa, synthetic construct; identical to SEQ ID NO: 679
  REGION 1..677: note = Description of Artificial Sequence: Synthetic Construct

SEQ ID NO: 3888 - protein, 607 aa, synthetic construct; identical to SEQ ID NO: 680
  REGION 1..607: note = Description of Artificial Sequence: Synthetic Construct

SEQ ID NO: 3889 - protein, 658 aa, synthetic construct; identical to SEQ ID NO: 681
  REGION 1..658: note = Description of Artificial Sequence: Synthetic Construct

SEQ ID NO: 3890 - protein, 686 aa, synthetic construct; identical to SEQ ID NO: 682
  REGION 1..686: note = Description of Artificial Sequence: Synthetic Construct

SEQ ID NO: 3891 - protein, 686 aa, synthetic construct; identical to SEQ ID NO: 683
  REGION 1..686: note = Description of Artificial Sequence: Synthetic Construct

SEQ ID NO: 3892 - protein, 677 aa, synthetic construct; identical to SEQ ID NO: 676
  REGION 1..677: note = Description of Artificial Sequence: Synthetic polypeptide

SEQ ID NO: 3893 - protein, 488 aa, synthetic construct; identical to SEQ ID NO: 685
  REGION 1..488: note = Description of Artificial Sequence: Synthetic polypeptide

SEQ ID NO: 3894 - protein, 508 aa, synthetic construct; identical to SEQ ID NO: 686
  REGION 1..508: note = Description of Artificial Sequence: Synthetic polypeptide

SEQ ID NO: 3895 - protein, 497 aa, synthetic construct; identical to SEQ ID NO: 687
  REGION 1..497: note = Description of Artificial Sequence: Synthetic polypeptide

SEQ ID NO: 3896 - protein, 502 aa, synthetic construct; identical to SEQ ID NO: 688
  REGION 1..502: note = Description of Artificial Sequence: Synthetic polypeptide

SEQ ID NO: 3897 - protein, 486 aa, synthetic construct; identical to SEQ ID NO: 669
  REGION 1..486: note = Description of Artificial Sequence: Synthetic polypeptide

SEQ ID NO: 3898 - protein, 743 aa, synthetic construct; identical to SEQ ID NO: 690
  REGION 1..743: note = Description of Artificial Sequence: Synthetic polypeptide

SEQ ID NO: 3899 - protein, 885 aa, synthetic construct; identical to SEQ ID NO: 691
  REGION 1..885: note = Description of Artificial Sequence: Synthetic polypeptide

SEQ ID NO: 3900 - protein, 907 aa, synthetic construct; identical to SEQ ID NO: 692
  REGION 1..907: note = Description of Artificial Sequence: Synthetic polypeptide

SEQ ID NO: 3901 - protein, 903 aa, synthetic construct; identical to SEQ ID NO: 693
  REGION 1..903: note = Description of Artificial Sequence: Synthetic polypeptide

SEQ ID NO: 3902 - protein, 604 aa, synthetic construct; identical to SEQ ID NO: 694
  REGION 1..604: note = Description of Artificial Sequence: Synthetic polypeptide

SEQ ID NO: 3903 - protein, 9 aa, synthetic construct
  REGION 1..9: note = Description of Artificial Sequence: Synthetic peptide
MHRSAAAAT

SEQ ID NO: 3904 - protein, 12 aa, synthetic construct
  REGION 1..12: note = Description of Artificial Sequence: Synthetic peptide
IPPPPPLSLPPP

SEQ ID NO: 3905 - protein, 43 aa, synthetic construct; identical to SEQ ID NO: 697
  REGION 1..43: note = Description of Artificial Sequence: Synthetic polypeptide

SEQ ID NO: 3906 - protein, 102 aa, synthetic construct; identical to SEQ ID NO: 698
  REGION 1..102: note = Description of Artificial Sequence: Synthetic polypeptide

SEQ ID NO: 3907 - protein, 41 aa, synthetic construct; identical to SEQ ID NO: 699
  REGION 1..41: note = Description of Artificial Sequence: Synthetic polypeptide

SEQ ID NO: 3908 - protein, 24 aa, synthetic construct
  REGION 1..24: note = Description of Artificial Sequence: Synthetic peptide
ARARRITWPSSRSSCASRCTWRAP

SEQ ID NO: 3909 - protein, 23 aa, synthetic construct
  REGION 1..23: note = Description of Artificial Sequence: Synthetic peptide
TATSSRSRARARAAPTRAPRPPS

SEQ ID NO: 3910 - protein, 24 aa, synthetic construct
  REGION 1..24: note = Description of Artificial Sequence: Synthetic peptide
PRVAPCPSPGTSCPLSSCTAPRPT

SEQ ID NO: 3911 - protein, 9 aa, synthetic construct
  REGION 1..9: note = Description of Artificial Sequence: Synthetic peptide
STPPTSPTT

SEQ ID NO: 3912 - protein, 12 aa, synthetic construct
  REGION 1..12: note = Description of Artificial Sequence: Synthetic peptide
SCPSPRASSGSA

SEQ ID NO: 3913 - protein, 7 aa, synthetic construct
  REGION 1..7: note = Description of Artificial Sequence: Synthetic peptide
TSRTAAW

SEQ ID NO: 3914 - protein, 14 aa, synthetic construct
  REGION 1..14: note = Description of Artificial Sequence: Synthetic peptide
PRTPPCRTASSSTR

SEQ ID NO: 3915 - protein, 12 aa, synthetic construct
  REGION 1..12: note = Description of Artificial Sequence: Synthetic peptide
SCAAPTSPPTAP

SEQ ID NO: 3916 - protein, 21 aa, synthetic construct
  REGION 1..21: note = Description of Artificial Sequence: Synthetic peptide
CRRRPWAGRPPPSGCTPRTAP

SEQ ID NO: 3917 - protein, 7 aa, synthetic construct
  REGION 1..7: note = Description of Artificial Sequence: Synthetic peptide
RARSSRG

SEQ ID NO: 3918 - protein, 64 aa, synthetic construct; identical to SEQ ID NO: 710
  REGION 1..64: note = Description of Artificial Sequence: Synthetic polypeptide

SEQ ID NO: 3919 - protein, 107 aa, Homo sapiens; identical to SEQ ID NO: 192

SEQ ID NO: 3920 - protein, 187 aa, Homo sapiens; identical to SEQ ID NO: 1

SEQ ID NO: 3921 - protein, 159 aa, Escherichia coli [sequence omitted]

SEQ ID NO: 3922 - protein, 327 aa, Homo sapiens; identical to SEQ ID NO: 195

SEQ ID NO: 3923 - protein, 189 aa, Homo sapiens; identical to SEQ ID NO: 196

SEQ ID NO: 3924 - protein, 260 aa, Homo sapiens; identical to SEQ ID NO: 197

SEQ ID NO: 3925 - protein, 231 aa, Homo sapiens; identical to SEQ ID NO: 198

SEQ ID NO: 3926 - protein, 114 aa, Homo sapiens; identical to SEQ ID NO: 718

SEQ ID NO: 3927 - protein, 267 aa, Homo sapiens; identical to SEQ ID NO: 719

SEQ ID NO: 3928 - protein, 234 aa, Homo sapiens; identical to SEQ ID NO: 720

SEQ ID NO: 3929 - protein, 231 aa, Homo sapiens; identical to SEQ ID NO: 721

SEQ ID NO: 3930 - protein, 353 aa, Homo sapiens; identical to SEQ ID NO: 722

SEQ ID NO: 3931 - protein, 61 aa, Homo sapiens; identical to SEQ ID NO: 723

SEQ ID NO: 3932 - protein, 237 aa, Homo sapiens; identical to SEQ ID NO: 724

SEQ ID NO: 3933 - protein, 175 aa, Homo sapiens; identical to SEQ ID NO: 725

SEQ ID NO: 3934 - protein, 65 aa, Homo sapiens; identical to SEQ ID NO: 726

SEQ ID NO: 3935 - protein, 107 aa, Homo sapiens; identical to SEQ ID NO: 192

SEQ ID NO: 3936 - protein, 187 aa, Homo sapiens; identical to SEQ ID NO: 1

SEQ ID NO: 3937 - protein, 159 aa, Escherichia coli [sequence omitted]

SEQ ID NO: 3938 - protein, 327 aa, Homo sapiens; identical to SEQ ID NO: 195

SEQ ID NO: 3939 - protein, 189 aa, Homo sapiens; identical to SEQ ID NO: 196

SEQ ID NO: 3940 - protein, 260 aa, Homo sapiens; identical to SEQ ID NO: 197

SEQ ID NO: 3941 - protein, 231 aa, Homo sapiens; identical to SEQ ID NO: 198

SEQ ID NO: 3942 - protein, 306 aa, Homo sapiens; identical to SEQ ID NO: 734

SEQ ID NO: 3943 - protein, 197 aa, Homo sapiens; identical to SEQ ID NO: 735

SEQ ID NO: 3944 - protein, 107 aa, Homo sapiens; identical to SEQ ID NO: 192

SEQ ID NO: 3945 - protein, 187 aa, Homo sapiens; identical to SEQ ID NO: 1

SEQ ID NO: 3946 - protein, 159 aa, Escherichia coli [sequence omitted]

SEQ ID NO: 3947 - protein, 327 aa, Homo sapiens; identical to SEQ ID NO: 195

SEQ ID NO: 3948 - protein, 189 aa, Homo sapiens; identical to SEQ ID NO: 196

SEQ ID NO: 3949 - protein, 260 aa, Homo sapiens; identical to SEQ ID NO: 197

SEQ ID NO: 3950 - protein, 231 aa, Homo sapiens; identical to SEQ ID NO: 198

SEQ ID NO: 3951 - protein, 133 aa, Homo sapiens [sequence omitted]

SEQ ID NO: 3952 - protein, 415 aa, Homo sapiens; identical to SEQ ID NO: 744

SEQ ID NO: 3953 - protein, 431 aa, Homo sapiens; identical to SEQ ID NO: 745

SEQ ID NO: 3954 - protein, 430 aa, synthetic construct; identical to SEQ ID NO: 746
  REGION 1..430: note = Description of Artificial Sequence: Synthetic Payload

SEQ ID NO: 3955 - protein, 396 aa, Homo sapiens; identical to SEQ ID NO: 747

SEQ ID NO: 3956 - protein, 395 aa, synthetic construct; identical to SEQ ID NO: 748
  REGION 1..395: note = Description of Artificial Sequence: Synthetic Payload

SEQ ID NO: 3957 - protein, 119 aa, synthetic construct; identical to SEQ ID NO: 749
  REGION 1..119: note = Description of Artificial Sequence: Synthetic Antibody variable domain

SEQ ID NO: 3958 - protein, 118 aa, synthetic construct; identical to SEQ ID NO: 750
  REGION 1..118: note = Description of Artificial Sequence: Synthetic Antibody variable domain

SEQ ID NO: 3959 - protein, 118 aa, synthetic construct; identical to SEQ ID NO: 750
  REGION 1..118: note = Description of Artificial Sequence: Synthetic Antibody variable domain

SEQ ID NO: 3960 - protein, 120 aa, synthetic construct; identical to SEQ ID NO: 752
  REGION 1..120: note = Description of Artificial Sequence: Synthetic Antibody variable domain

SEQ ID NO: 3961 - protein, 119 aa, synthetic construct; identical to SEQ ID NO: 753
  REGION 1..119: note = Description of Artificial Sequence: Synthetic Antibody variable domain

SEQ ID NO: 3962 - protein, 119 aa, synthetic construct; identical to SEQ ID NO: 754
  REGION 1..119: note = Description of Artificial Sequence: Synthetic Antibody variable domain

SEQ ID NO: 3963 - protein, 117 aa, synthetic construct; identical to SEQ ID NO: 755
  REGION 1..117: note = Description of Artificial Sequence: Synthetic Antibody variable domain

SEQ ID NO: 3964 - protein, 119 aa, synthetic construct; identical to SEQ ID NO: 756
  REGION 1..119: note = Description of Artificial Sequence: Synthetic Antibody variable domain

SEQ ID NO: 3965 - protein, 112 aa, synthetic construct; identical to SEQ ID NO: 757
  REGION 1..112: note = Description of Artificial Sequence: Synthetic Antibody variable domain

SEQ ID NO: 3966 - protein, 111 aa, synthetic construct; identical to SEQ ID NO: 758
  REGION 1..111: note = Description of Artificial Sequence: Synthetic Antibody variable domain

SEQ ID NO: 3967 - protein, 112 aa, synthetic construct; identical to SEQ ID NO: 759
  REGION 1..112: note = Description of Artificial Sequence: Synthetic Antibody variable domain

SEQ ID NO: 3968 - protein, 107 aa, synthetic construct; identical to SEQ ID NO: 760
  REGION 1..107: note = Description of Artificial Sequence: Synthetic Antibody variable domain

SEQ ID NO: 3969 - protein, 112 aa, synthetic construct; identical to SEQ ID NO: 761
  REGION 1..112: note = Description of Artificial Sequence: Synthetic Antibody variable domain

SEQ ID NO: 3970 - protein, 111 aa, synthetic construct; identical to SEQ ID NO: 762
  REGION 1..111: note = Description of Artificial Sequence: Synthetic Antibody variable domain

SEQ ID NO: 3971 - protein, 112 aa, synthetic construct; identical to SEQ ID NO: 763
  REGION 1..112: note = Description of Artificial Sequence: Synthetic Antibody variable domain

SEQ ID NO: 3972 - protein, 107 aa, synthetic construct; identical to SEQ ID NO: 764
  REGION 1..107: note = Description of Artificial Sequence: Synthetic Antibody variable domain

SEQ ID NO: 3973 - protein, 246 aa, synthetic construct; identical to SEQ ID NO: 765
  REGION 1..246: note = Description of Artificial Sequence: Synthetic scFv

SEQ ID NO: 3974 - protein, 246 aa, synthetic construct; identical to SEQ ID NO: 766
  REGION 1..246: note = Description of Artificial Sequence: Synthetic scFv

SEQ ID NO: 3975 - protein, 245 aa, synthetic construct; identical to SEQ ID NO: 767
  REGION 1..245: note = Description of Artificial Sequence: Synthetic scFv

SEQ ID NO: 3976 - protein, 242 aa, synthetic construct; identical to SEQ ID NO: 768
  REGION 1..242: note = Description of Artificial Sequence: Synthetic scFv

SEQ ID NO: 3977 - protein, 248 aa, synthetic construct; identical to SEQ ID NO: 769
  REGION 1..248: note = Description of Artificial Sequence: Synthetic scFv

SEQ ID NO: 3978 - protein, 247 aa, synthetic construct; identical to SEQ ID NO: 770
  REGION 1..247: note = Description of Artificial Sequence: Synthetic scFv

SEQ ID NO: 3979 - protein, 246 aa, synthetic construct; identical to SEQ ID NO: 771
  REGION 1..246: note = Description of Artificial Sequence: Synthetic scFv

SEQ ID NO: 3980 - protein, 243 aa, synthetic construct; identical to SEQ ID NO: 772
  REGION 1..243: note = Description of Artificial Sequence: Synthetic scFv

SEQ ID NO: 3981 - protein, 107 aa, synthetic construct; identical to SEQ ID NO: 773
  REGION 1..107: note = Description of Artificial Sequence: Synthetic Antibody variable domain

SEQ ID NO: 3982 - protein, 244 aa, synthetic construct; identical to SEQ ID NO: 789
  REGION 1..244: note = Description of Artificial Sequence: Synthetic scFv

SEQ ID NO: 3983 - protein, 244 aa, synthetic construct; identical to SEQ ID NO: 790
  REGION 1..244: note = Description of Artificial Sequence: Synthetic scFv

SEQ ID NO: 3984 - protein, 248 aa, synthetic construct; identical to SEQ ID NO: 791
  REGION 1..248: note = Description of Artificial Sequence: Synthetic scFv

SEQ ID NO: 3985 - protein, 120 aa, Mus musculus; identical to SEQ ID NO: 781

SEQ ID NO: 3986 - protein, 119 aa, synthetic construct; identical to SEQ ID NO: 782
  REGION 1..119: note = Description of Artificial Sequence: Synthetic Antibody variable domain

SEQ ID NO: 3987 - protein, 122 aa, synthetic construct; identical to SEQ ID NO: 783
  REGION 1..122: note = Description of Artificial Sequence: Synthetic Antibody variable domain

SEQ ID NO: 3988 - protein, 117 aa, synthetic construct; identical to SEQ ID NO: 784
  REGION 1..117: note = Description of Artificial Sequence: Synthetic Antibody variable domain

SEQ ID NO: 3989 - protein, 107 aa, Mus musculus; identical to SEQ ID NO: 785

SEQ ID NO: 3990 - protein, 109 aa, synthetic construct; identical to SEQ ID NO: 786
  REGION 1..109: note = Description of Artificial Sequence: Synthetic Antibody variable domain

SEQ ID NO: 3991 - protein, 110 aa, synthetic construct; identical to SEQ ID NO: 787
  REGION 1..110: note = Description of Artificial Sequence: Synthetic Antibody variable domain

SEQ ID NO: 3992 - protein, 109 aa, synthetic construct; identical to SEQ ID NO: 788
  REGION 1..109: note = Description of Artificial Sequence: Synthetic Antibody variable domain

SEQ ID NO: 3993 - protein, 244 aa, synthetic construct; identical to SEQ ID NO: 789
  REGION 1..244: note = Description of Artificial Sequence: Synthetic scFv

SEQ ID NO: 3994 - protein, 244 aa, synthetic construct; identical to SEQ ID NO: 790
  REGION 1..244: note = Description of Artificial Sequence: Synthetic scFv

SEQ ID NO: 3995 - protein, 248 aa, synthetic construct; identical to SEQ ID NO: 791
  REGION 1..248: note = Description of Artificial Sequence: Synthetic scFv

SEQ ID NO: 3996 - protein, 242 aa, synthetic construct; identical to SEQ ID NO: 792
  REGION 1..242: note = Description of Artificial Sequence: Synthetic scFv

SEQ ID NO: 3997 - protein, 449 aa, synthetic construct; identical to SEQ ID NO: 793
  REGION 1..449: note = Description of Artificial Sequence: Synthetic Antibody variable domain

SEQ ID NO: 3998 - protein, 211 aa, synthetic construct; identical to SEQ ID NO: 794
  REGION 1..211: note = Description of Artificial Sequence: Synthetic Antibody variable domain

SEQ ID NO: 3999 - protein, 446 aa, synthetic construct; identical to SEQ ID NO: 795
  REGION 1..446: note = Description of Artificial Sequence: Synthetic Antibody variable domain

SEQ ID NO: 4000 - protein, 448 aa, synthetic construct; identical to SEQ ID NO: 796
  REGION 1..448: note = Description of Artificial Sequence: Synthetic Antibody variable domain

SEQ ID NO: 4001 - protein, 211 aa, synthetic construct; identical to SEQ ID NO: 797
  REGION 1..211: note = Description of Artificial Sequence: Synthetic Antibody variable domain

SEQ ID NO: 4002 - protein, 448 aa, synthetic construct; identical to SEQ ID NO: 798
  REGION 1..448: note = Description of Artificial Sequence: Synthetic Antibody variable domain

SEQ ID NO: 4003 - protein, 211 aa, synthetic construct; identical to SEQ ID NO: 799
  REGION 1..211: note = Description of Artificial Sequence: Synthetic Antibody variable domain

SEQ ID NO: 4004 - protein, 446 aa, synthetic construct; identical to SEQ ID NO: 800
  REGION 1..446: note = Description of Artificial Sequence: Synthetic Antibody variable domain

SEQ ID NO: 4005 - protein, 105 aa, Homo sapiens; identical to SEQ ID NO: 801

SEQ ID NO: 4006 - protein, 102 aa, Homo sapiens; identical to SEQ ID NO: 802

SEQ ID NO: 4007 - protein, 449 aa, synthetic construct; identical to SEQ ID NO: 793
  REGION 1..449: note = Description of Artificial Sequence: Synthetic Antibody variable domain

SEQ ID NO: 4008 - protein, 211 aa, synthetic construct; identical to SEQ ID NO: 794
  REGION 1..211: note = Description of Artificial Sequence: Synthetic Antibody variable domain

SEQ ID NO: 4009 - protein, 449 aa, synthetic construct; identical to SEQ ID NO: 805
  REGION 1..449: note = Description of Artificial Sequence: Synthetic Antibody variable domain

SEQ ID NO: 4010 - protein, 211 aa, synthetic construct; identical to SEQ ID NO: 806
  REGION 1..211: note = Description of Artificial Sequence: Synthetic Antibody variable domain

SEQ ID NO: 4011 - protein, 446 aa, synthetic construct; identical to SEQ ID NO: 795
  REGION 1..446: note = Description of Artificial Sequence: Synthetic Antibody variable domain

SEQ ID NO: 4012 - protein, 446 aa, synthetic construct; identical to SEQ ID NO: 800
  REGION 1..446: note = Description of Artificial Sequence: Synthetic Antibody variable domain

SEQ ID NO: 4013 - protein, 119 aa, synthetic construct; identical to SEQ ID NO: 809
  REGION 1..119: note = Description of Artificial Sequence: Synthetic Antibody variable domain

SEQ ID NO: 4014 - protein, 104 aa, synthetic construct; identical to SEQ ID NO: 810
  REGION 1..104: note = Description of Artificial Sequence: Synthetic Antibody variable domain

SEQ ID NO: 4015 - protein, 118 aa, synthetic construct; identical to SEQ ID NO: 811
  REGION 1..118: note = Description of Artificial Sequence: Synthetic Antibody variable domain

SEQ ID NO: 4016 - protein, 118 aa, synthetic construct; identical to SEQ ID NO: 812
  REGION 1..118: note = Description of Artificial Sequence: Synthetic Antibody variable domain

SEQ ID NO: 4017 - protein, 108 aa, synthetic construct; identical to SEQ ID NO: 813
  REGION 1..108: note = Description of Artificial Sequence: Synthetic Antibody variable domain

SEQ ID NO: 4018 - protein, 108 aa, synthetic construct; identical to SEQ ID NO: 814
  REGION 1..108: note = Description of Artificial Sequence: Synthetic Antibody variable domain

SEQ ID NO: 4019 - protein, 113 aa, synthetic construct; identical to SEQ ID NO: 815
  REGION 1..113: note = Description of Artificial Sequence: Synthetic Antibody variable domain

SEQ ID NO: 4020 - protein, 113 aa, synthetic construct; identical to SEQ ID NO: 816
  REGION 1..113: note = Description of Artificial Sequence: Synthetic Antibody variable domain

SEQ ID NO: 4021 - protein, 118 aa, synthetic construct; identical to SEQ ID NO: 811
  REGION 1..118: note = Description of Artificial Sequence: Synthetic Antibody variable domain

SEQ ID NO: 4022 - protein, 118 aa, synthetic construct; identical to SEQ ID NO: 812
  REGION 1..118: note = Description of Artificial Sequence: Synthetic Antibody variable domain

SEQ ID NO: 4023 - protein, 108 aa, synthetic construct; identical to SEQ ID NO: 813
  REGION 1..108: note = Description of Artificial Sequence: Synthetic Antibody variable domain

SEQ ID NO: 4024 - protein, 108 aa, synthetic construct; identical to SEQ ID NO: 814
  REGION 1..108: note = Description of Artificial Sequence: Synthetic Antibody variable domain

SEQ ID NO: 4025 - protein, 240 aa, synthetic construct; identical to SEQ ID NO: 821
  REGION 1..240: note = Description of Artificial Sequence: Synthetic Antibody variable domain

SEQ ID NO: 4026 - protein, 462 aa, synthetic construct; identical to SEQ ID NO: 822
  REGION 1..462: note = Description of Artificial Sequence: Synthetic Antibody variable domain

SEQ ID NO: 4027 - protein, 120 aa, synthetic construct; identical to SEQ ID NO: 823
  REGION 1..120: note = Description of Artificial Sequence: Synthetic Antibody variable domain

SEQ ID NO: 4028 - protein, 112 aa, synthetic construct; identical to SEQ ID NO: 824
  REGION 1..112: note = Description of Artificial Sequence: Synthetic Antibody variable domain

SEQ ID NO: 4029 - protein, 120 aa, synthetic construct; identical to SEQ ID NO: 825
  REGION 1..120: note = Description of Artificial Sequence: Synthetic Antibody variable domain

SEQ ID NO: 4030 - protein, 112 aa, synthetic construct; identical to SEQ ID NO: 826
  REGION 1..112: note = Description of Artificial Sequence: Synthetic Antibody variable domain

SEQ ID NO: 4031 - protein, 119 aa, synthetic construct; identical to SEQ ID NO: 827
  REGION 1..119: note = Description of Artificial Sequence: Synthetic Antibody variable domain

SEQ ID NO: 4032 - protein, 113 aa, synthetic construct; identical to SEQ ID NO: 828
  REGION 1..113: note = Description of Artificial Sequence: Synthetic Antibody variable domain

SEQ ID NO: 4033 - protein, 119 aa, synthetic construct; identical to SEQ ID NO: 829
  REGION 1..119: note = Description of Artificial Sequence: Synthetic Antibody variable domain

SEQ ID NO: 4034 - protein, 113 aa, synthetic construct; identical to SEQ ID NO: 830
  REGION 1..113: note = Description of Artificial Sequence: Synthetic Antibody variable domain

SEQ ID NO: 4035 - protein, 119 aa, synthetic construct; identical to SEQ ID NO: 831
  REGION 1..119: note = Description of Artificial Sequence: Synthetic Antibody variable domain

SEQ ID NO: 4036 - protein, 113 aa, synthetic construct; identical to SEQ ID NO: 832
  REGION 1..113: note = Description of Artificial Sequence: Synthetic Antibody variable domain

SEQ ID NO: 4037 - protein, 119 aa, synthetic construct; identical to SEQ ID NO: 833
  REGION 1..119: note = Description of Artificial Sequence: Synthetic Antibody variable domain

SEQ ID NO: 4038 - protein, 113 aa, synthetic construct; identical to SEQ ID NO: 834
  REGION 1..113: note = Description of Artificial Sequence: Synthetic Antibody variable domain

SEQ ID NO: 4039 - protein, 120 aa, synthetic construct; identical to SEQ ID NO: 835
  REGION 1..120: note = Description of Artificial Sequence: Synthetic Antibody variable domain

SEQ ID NO: 4040 - protein, 112 aa, synthetic construct; identical to SEQ ID NO: 836
  REGION 1..112: note = Description of Artificial Sequence: Synthetic Antibody variable domain

SEQ ID NO: 4041 - protein, 120 aa, synthetic construct; identical to SEQ ID NO: 837
  REGION 1..120: note = Description of Artificial Sequence: Synthetic Antibody variable domain

SEQ ID NO: 4042 - protein, 112 aa, synthetic construct; identical to SEQ ID NO: 838
  REGION 1..112: note = Description of Artificial Sequence: Synthetic Antibody variable domain

SEQ ID NO: 4043 - protein, 121 aa, synthetic construct; identical to SEQ ID NO: 839
  REGION 1..121: note = Description of Artificial Sequence: Synthetic Antibody variable domain

SEQ ID NO: 4044 - protein, 121 aa, synthetic construct; identical to SEQ ID NO: 840
  REGION 1..121: note = Description of Artificial Sequence: Synthetic Antibody variable domain

SEQ ID NO: 4045 - protein, 107 aa, synthetic construct
  REGION 1..107: note = Description of Artificial Sequence: Synthetic Antibody variable domain
DIRMTQSPSSLSASVGDRVTITCRASQGISNYLAWYQQKPGKVPKFLIYAASTLQSGVPSRFSGSGSGTDFTLTISSLQPEDVATYYCQKYNSAPWTFGQGTKVEIK

SEQ ID NO: 4046 - protein, 119 aa, synthetic construct; identical to SEQ ID NO: 842
  REGION 1..119: note = Description of Artificial Sequence: Synthetic Antibody variable domain

SEQ ID NO: 4047 - protein, 113 aa, synthetic construct; identical to SEQ ID NO: 843
  REGION 1..113: note = Description of Artificial Sequence: Synthetic Antibody variable domain

SEQ ID NO: 4048 - protein, 240 aa, synthetic construct; identical to SEQ ID NO: 821
  REGION 1..240: note = Description of Artificial Sequence: Synthetic Antibody variable domain

SEQ ID NO: 4049 - protein, 462 aa, synthetic construct; identical to SEQ ID NO: 822
  REGION 1..462: note = Description of Artificial Sequence: Synthetic Antibody variable domain

SEQ ID NO: 4050 - protein, 239 aa, synthetic construct; identical to SEQ ID NO: 846
  REGION 1..239: note = Description of Artificial Sequence: Synthetic Antibody variable domain

SEQ ID NO: 4051 - protein, 595 aa, synthetic construct; identical to SEQ ID NO: 847
  REGION 1..595: note = Description of Artificial Sequence: Synthetic Antibody variable domain

SEQ ID NO: 4052 - protein, 105 aa, Homo sapiens; identical to SEQ ID NO: 801

SEQ ID NO: 4053 - protein, 102 aa, Homo sapiens; identical to SEQ ID NO: 802

SEQ ID NO: 4054 - protein, 569 aa, Homo sapiens; identical to SEQ ID NO: 850

SEQ ID NO: 4055 - protein, 219 aa, Homo sapiens; identical to SEQ ID NO: 851

SEQ ID NO: 4056 - protein, 240 aa, synthetic construct; identical to SEQ ID NO: 821
  REGION 1..240: note = Description of Artificial Sequence: Synthetic Antibody variable domain

SEQ ID NO: 4057 - protein, 462 aa, synthetic construct; identical to SEQ ID NO: 822
  REGION 1..462: note = Description of Artificial Sequence: Synthetic Antibody variable domain

SEQ ID NO: 4058 - protein, 113 aa, synthetic construct; identical to SEQ ID NO: 816
  REGION 1..113: note = Description of Artificial Sequence: Synthetic Antibody variable domain

SEQ ID NO: 4059 - protein, 113 aa, synthetic construct; identical to SEQ ID NO: 815
  REGION 1..113: note = Description of Artificial Sequence: Synthetic Antibody variable domain

SEQ ID NO: 4060 - protein, 240 aa, synthetic construct; identical to SEQ ID NO: 821
  REGION 1..240: note = Description of Artificial Sequence: Synthetic Antibody variable domain

SEQ ID NO: 4061 - protein, 462 aa, synthetic construct; identical to SEQ ID NO: 822
  REGION 1..462: note = Description of Artificial Sequence: Synthetic Antibody variable domain

SEQ ID NO: 4062 - protein, 137 aa, Mus musculus; identical to SEQ ID NO: 858

SEQ ID NO: 4063 - protein, 133 aa, Mus musculus; identical to SEQ ID NO: 859

SEQ ID NO: 4064 - protein, 112 aa, synthetic construct; identical to SEQ ID NO: 860
  REGION 1..112: note = Description of Artificial Sequence: Synthetic Antibody variable domain

SEQ ID NO: 4065 - protein, 119 aa, synthetic construct; identical to SEQ ID NO: 861
  REGION 1..119: note = Description of Artificial Sequence: Synthetic Antibody variable domain

SEQ ID NO: 4066 - protein, 112 aa, Mus musculus; identical to SEQ ID NO: 860

SEQ ID NO: 4067 - protein, 119 aa, Mus musculus; identical to SEQ ID NO: 861

SEQ ID NO: 4068 - protein, 112 aa, Mus musculus; identical to SEQ ID NO: 864

SEQ ID NO: 4069 - protein, 119 aa, Mus musculus; identical to SEQ ID NO: 861

SEQ ID NO: 4070 - protein, 112 aa, synthetic construct; identical to SEQ ID NO: 860
  REGION 1..112: note = Description of Artificial Sequence: Synthetic Antibody variable domain

SEQ ID NO: 4071 - protein, 119 aa, synthetic construct; identical to SEQ ID NO: 861
  REGION 1..119: note = Description of Artificial Sequence: Synthetic Antibody variable domain

SEQ ID NO: 4072 - protein, 115 aa, synthetic construct; identical to SEQ ID NO: 868
  REGION 1..115: note = Description of Artificial Sequence: Synthetic Antibody variable domain

SEQ ID NO: 4073 - protein, 108 aa, synthetic construct; identical to SEQ ID NO: 869
  REGION 1..108: note = Description of Artificial Sequence: Synthetic Antibody variable domain

SEQ ID NO: 4074 - protein, 115 aa, synthetic construct; identical to SEQ ID NO: 870
  REGION 1..115: note = Description of Artificial Sequence: Synthetic Antibody variable domain

SEQ ID NO: 4075 - protein, 111 aa, synthetic construct; identical to SEQ ID NO: 871
  REGION 1..111: note = Description of Artificial Sequence: Synthetic Antibody variable domain

SEQ ID NO: 4076 - protein, 518 aa, synthetic construct; identical to SEQ ID NO: 872
  REGION 1..518: note = Description of Artificial Sequence: Synthetic scFv

SEQ ID NO: 4077 - protein, 524 aa, synthetic construct; identical to SEQ ID NO: 873
  REGION 1..524: note = Description of Artificial Sequence: Synthetic scFv

SEQ ID NO: 4078 - protein, 248 aa, synthetic construct; identical to SEQ ID NO: 874
  REGION 1..248: note = Description of Artificial Sequence: Synthetic scFv

SEQ ID NO: 4079 - protein, 225 aa, synthetic construct; identical to SEQ ID NO: 875
  REGION 1..225: note = Description of Artificial Sequence: Synthetic scFv

SEQ ID NO: 4080 - protein, 244 aa, synthetic construct; identical to SEQ ID NO: 876
  REGION 1..244: note = Description of Artificial Sequence: Synthetic scFv

SEQ ID NO: 4081 - protein, 230 aa, synthetic construct; identical to SEQ ID NO: 877
  REGION 1..230: note = Description of Artificial Sequence: Synthetic scFv

SEQ ID NO: 4082 - protein, 241 aa, synthetic construct; identical to SEQ ID NO: 878
  REGION 1..241: note = Description of Artificial Sequence: Synthetic scFv

SEQ ID NO: 4083 - protein, 249 aa, synthetic construct; identical to SEQ ID NO: 879
  REGION 1..249: note = Description of Artificial Sequence: Synthetic scFv

SEQ ID NO: 4084 - protein, 244 aa, synthetic construct; identical to SEQ ID NO: 880
  REGION 1..244: note = Description of Artificial Sequence: Synthetic scFv

SEQ ID NO: 4085 - protein, 243 aa, synthetic construct; identical to SEQ ID NO: 881
  REGION 1..243: note = Description of Artificial Sequence: Synthetic scFv

SEQ ID NO: 4086 - protein, 241 aa, synthetic construct; identical to SEQ ID NO: 882
  REGION 1..241: note = Description of Artificial Sequence: Synthetic scFv

SEQ ID NO: 4087 - protein, 239 aa, synthetic construct; identical to SEQ ID NO: 883
  REGION 1..239: note = Description of Artificial Sequence: Synthetic scFv

SEQ ID NO: 4088 - protein, 239 aa, synthetic construct; identical to SEQ ID NO: 884
  REGION 1..239: note = Description of Artificial Sequence: Synthetic scFv

SEQ ID NO: 4089 - protein, 239 aa, synthetic construct; identical to SEQ ID NO: 885
  REGION 1..239: note = Description of Artificial Sequence: Synthetic scFv

SEQ ID NO: 4090 - protein, 239 aa, synthetic construct; identical to SEQ ID NO: 886
  REGION 1..239: note = Description of Artificial Sequence: Synthetic scFv

SEQ ID NO: 4091 - protein, 239 aa, synthetic construct; identical to SEQ ID NO: 887
  REGION 1..239: note = Description of Artificial Sequence: Synthetic scFv

SEQ ID NO: 4092 - protein, 239 aa, synthetic construct; identical to SEQ ID NO: 888
  REGION 1..239: note = Description of Artificial Sequence: Synthetic scFv

SEQ ID NO: 4093 - protein, 239 aa, synthetic construct; identical to SEQ ID NO: 889
  REGION 1..239: note = Description of Artificial Sequence: Synthetic scFv

SEQ ID NO: 4094 - protein, 239 aa, synthetic construct; identical to SEQ ID NO: 890
  REGION 1..239: note = Description of Artificial Sequence: Synthetic scFv

SEQ ID NO: 4095 - protein, 239 aa, synthetic construct; identical to SEQ ID NO: 891
  REGION 1..239: note = Description of Artificial Sequence: Synthetic scFv

SEQ ID NO: 4096 - protein, 239 aa, synthetic construct; identical to SEQ ID NO: 892
  REGION 1..239: note = Description of Artificial Sequence: Synthetic scFv

SEQ ID NO: 4097 - protein, 239 aa, synthetic construct; identical to SEQ ID NO: 893
  REGION 1..239: note = Description of Artificial Sequence: Synthetic scFv

SEQ ID NO: 4098 - protein, 239 aa, synthetic construct; identical to SEQ ID NO: 894
  REGION 1..239: note = Description of Artificial Sequence: Synthetic scFv

SEQ ID NO: 4099 - protein, 239 aa, synthetic construct; identical to SEQ ID NO: 895
  REGION 1..239: note = Description of Artificial Sequence: Synthetic scFv

SEQ ID NO: 4100 - protein, 239 aa, synthetic construct; identical to SEQ ID NO: 896
  REGION 1..239: note = Description of Artificial Sequence: Synthetic scFv

SEQ ID NO: 4101 - protein, 100 aa, synthetic construct; identical to SEQ ID NO: 897
  REGION 1..100: note = Description of Artificial Sequence: Synthetic scFv

SEQ ID NO: 4102 - protein, 139 aa, synthetic construct; identical to SEQ ID NO: 898
  REGION 1..139: note = Description of Artificial Sequence: Synthetic scFv

SEQ ID NO: 4103 - protein, 243 aa, synthetic construct; identical to SEQ ID NO: 899
  REGION 1..243: note = Description of Artificial Sequence: Synthetic scFv

SEQ ID NO: 4104 - protein, 242 aa, synthetic construct; identical to SEQ ID NO: 900
  REGION 1..242: note = Description of Artificial Sequence: Synthetic scFv

SEQ ID NO: 4105 - protein, 115 aa, synthetic construct; identical to SEQ ID NO: 901
  REGION 1..115: note = Description of Artificial Sequence: Synthetic Antibody variable domain

SEQ ID NO: 4106 - protein, 111 aa, synthetic construct; identical to SEQ ID NO: 902
  REGION 1..111: note = Description of Artificial Sequence: Synthetic Antibody variable domain

SEQ ID NO: 4107 - protein, 117 aa, synthetic construct; identical to SEQ ID NO: 903
  REGION 1..117: note = Description of Artificial Sequence: Synthetic Antibody variable domain

SEQ ID NO: 4108 - protein, 228 aa, synthetic construct; identical to SEQ ID NO: 904
  REGION 1..228: note = Description of Artificial Sequence: Synthetic Antibody variable domain

SEQ ID NO: 4109 - protein, 120 aa, synthetic construct; identical to SEQ ID NO: 905
  REGION 1..120: note = Description of Artificial Sequence: Synthetic Antibody variable domain

SEQ ID NO: 4110 - protein, 115 aa, synthetic construct; identical to SEQ ID NO: 906
  REGION 1..115: note = Description of Artificial Sequence: Synthetic Antibody variable domain

SEQ ID NO: 4111 - protein, 118 aa, synthetic construct; identical to SEQ ID NO: 907
  REGION 1..118: note = Description of Artificial Sequence: Synthetic Antibody variable domain

SEQ ID NO: 4112 - protein, 113 aa, synthetic construct; identical to SEQ ID NO: 908
  REGION 1..113: note = Description of Artificial Sequence: Synthetic Antibody variable domain

SEQ ID NO: 4113 - protein, 119 aa, synthetic construct; identical to SEQ ID NO: 909
  REGION 1..119: note = Description of Artificial Sequence: Synthetic Antibody variable domain

SEQ ID NO: 4114 - protein, 112 aa, synthetic construct; identical to SEQ ID NO: 910
  REGION 1..112: note = Description of Artificial Sequence: Synthetic Antibody variable domain

SEQ ID NO: 4115 - protein, 119 aa, synthetic construct; identical to SEQ ID NO: 911
  REGION 1..119: note = Description of Artificial Sequence: Synthetic Antibody variable domain

SEQ ID NO: 4116 - protein, 112 aa, synthetic construct; identical to SEQ ID NO: 912
  REGION 1..112: note = Description of Artificial Sequence: Synthetic Antibody variable domain

SEQ ID NO: 4117 - protein, 117 aa, synthetic construct; identical to SEQ ID NO: 913
  REGION 1..117: note = Description of Artificial Sequence: Synthetic Antibody variable domain

SEQ ID NO: 4118 - protein, 111 aa, synthetic construct; identical to SEQ ID NO: 914
  REGION 1..111: note = Description of Artificial Sequence: Synthetic Antibody variable domain

SEQ ID NO: 4119 - protein, 117 aa, synthetic construct; identical to SEQ ID NO: 915
  REGION 1..117: note = Description of Artificial Sequence: Synthetic Antibody variable domain

SEQ ID NO: 4120 - protein, 111 aa, synthetic construct; identical to SEQ ID NO: 916
  REGION 1..111: note = Description of Artificial Sequence: Synthetic Antibody variable domain

SEQ ID NO: 4121 - protein, 120 aa, synthetic construct [sequence omitted]

SEQ ID NO: 4122 - protein, 107 aa, synthetic construct [sequence omitted]

SEQ ID NO: 4123 - protein, 109 aa, synthetic construct; identical to SEQ ID NO: 919
  REGION 1..109: note = Description of Artificial Sequence: Synthetic Antibody variable domain

SEQ ID NO: 4124 - protein, 120 aa, synthetic construct; identical to SEQ ID NO: 920
  REGION 1..120: note = Description of Artificial Sequence: Synthetic Antibody variable domain

SEQ ID NO: 4125 - protein, 109 aa, synthetic construct; identical to SEQ ID NO: 921
  REGION 1..109: note = Description of Artificial Sequence: Synthetic Antibody variable domain

SEQ ID NO: 4126 - protein, 120 aa, synthetic construct; identical to SEQ ID NO: 922
  REGION 1..120: note = Description of Artificial Sequence: Synthetic Antibody variable domain

SEQ ID NO: 4127 - protein, 109 aa, synthetic construct; identical to SEQ ID NO: 923
  REGION 1..109: note = Description of Artificial Sequence: Synthetic Antibody variable domain

SEQ ID NO: 4128 - protein, 120 aa, synthetic construct; identical to SEQ ID NO: 924
  REGION 1..120: note = Description of Artificial Sequence: Synthetic Antibody variable domain

SEQ ID NO: 4129 - protein, 20 aa, synthetic construct
  REGION 1..20: note = Description of Artificial Sequence: Synthetic Antibody variable domain
EVQLVESGGGLVQPKGSLKL

SEQ ID NO: 4130 - protein, 20 aa, synthetic construct
  REGION 1..20: note = Description of Artificial Sequence: Synthetic Antibody variable domain
DIVMTQSQKFMSTSVVDRIS

SEQ ID NO: 4131 - protein, 107 aa, Mus musculus; identical to SEQ ID NO: 927

SEQ ID NO: 4132 - protein, 119 aa, Mus musculus; identical to SEQ ID NO: 928

SEQ ID NO: 4133 - protein, 107 aa, synthetic construct [sequence omitted]

SEQ ID NO: 4134 - protein, 119 aa, synthetic construct [sequence omitted]

SEQ ID NO: 4135 - protein, 107 aa, synthetic construct; identical to SEQ ID NO: 931
  REGION 1..107: note = Description of Artificial Sequence: Synthetic Antibody variable domain

SEQ ID NO: 4136 - protein, 119 aa, synthetic construct; identical to SEQ ID NO: 932
  REGION 1..119: note = Description of Artificial Sequence: Synthetic Antibody variable domain

SEQ ID NO: 4137 - protein, 214 aa, synthetic construct; identical to SEQ ID NO: 933
  REGION 1..214: note = Description of Artificial Sequence: Synthetic Antibody variable domain

SEQ ID NO: 4138 - protein, 448 aa, synthetic construct; identical to SEQ ID NO: 934
  REGION 1..448: note = Description of Artificial Sequence: Synthetic Antibody variable domain

SEQ ID NO: 4139 - protein, 214 aa, synthetic construct; identical to SEQ ID NO: 935
  REGION 1..214: note = Description of Artificial Sequence: Synthetic Antibody variable domain

SEQ ID NO: 4140 - protein, 449 aa, synthetic construct; identical to SEQ ID NO: 936
  REGION 1..449: note = Description of Artificial Sequence: Synthetic Antibody variable domain

SEQ ID NO: 4141 - protein, 217 aa, synthetic construct; identical to SEQ ID NO: 937
  REGION 1..217: note = Description of Artificial Sequence: Synthetic Antibody variable domain

SEQ ID NO: 4142 - protein, 449 aa, synthetic construct; identical to SEQ ID NO: 938
  REGION 1..449: note = Description of Artificial Sequence: Synthetic Antibody variable domain

SEQ ID NO: 4143 - protein, 124 aa, Homo sapiens; identical to SEQ ID NO: 939

SEQ ID NO: 4144 - protein, 107 aa, Homo sapiens; identical to SEQ ID NO: 940

SEQ ID NO: 4145 - protein, 122 aa, Homo sapiens; identical to SEQ ID NO: 941

SEQ ID NO: 4146 - protein, 107 aa, Homo sapiens; identical to SEQ ID NO: 942

SEQ ID NO: 4147 - protein, 122 aa, Homo sapiens; identical to SEQ ID NO: 943

SEQ ID NO: 4148 - protein, 108 aa, Homo sapiens; identical to SEQ ID NO: 944

SEQ ID NO: 4149 - protein, 109 aa, synthetic construct; identical to SEQ ID NO: 945
  REGION 1..109: note = Description of Artificial Sequence: Synthetic Antibody variable domain

SEQ ID NO: 4150 - protein, 109 aa, synthetic construct; identical to SEQ ID NO: 946
  REGION 1..109: note = Description of Artificial Sequence: Synthetic Antibody variable domain

SEQ ID NO: 4151 - protein, 109 aa, synthetic construct; identical to SEQ ID NO: 947
  REGION 1..109: note = Description of Artificial Sequence: Synthetic Antibody variable domain

SEQ ID NO: 4152 - protein, 228 aa, synthetic construct; identical to SEQ ID NO: 948
  REGION 1..228: note = Description of Artificial Sequence: Synthetic Antibody variable domain

SEQ ID NO: 4153 - protein, 109 aa, Homo sapiens; identical to SEQ ID NO: 949

SEQ ID NO: 4154 - protein, 142 aa, synthetic construct; identical to SEQ ID NO: 950
  REGION 1..142: note = Description of Artificial Sequence: Synthetic Antibody variable domain

SEQ ID NO: 4155 - protein, 130 aa, synthetic construct; identical to SEQ ID NO: 951
  REGION 1..130: note = Description of Artificial Sequence: Synthetic Antibody variable domain

SEQ ID NO: 4156 - protein, 472 aa, synthetic construct; identical to SEQ ID NO: 952
  REGION 1..472: note = Description of Artificial Sequence: Synthetic Antibody variable domain

SEQ ID NO: 4157 - protein, 236 aa, synthetic construct; identical to SEQ ID NO: 953
  REGION 1..236: note = Description of Artificial Sequence: Synthetic Antibody variable domain

SEQ ID NO: 4158 - protein, 628 aa, synthetic construct; identical to SEQ ID NO: 954
  REGION 1..628: note = Description of Artificial Sequence: Synthetic Antibody variable domain

SEQ ID NO: 4159 - protein, 643 aa, synthetic construct; identical to SEQ ID NO: 955
  REGION 1..643: note = Description of Artificial Sequence: Synthetic Antibody variable domain

SEQ ID NO: 4160 - protein, 214 aa, Mus musculus; identical to SEQ ID NO: 956

SEQ ID NO: 4161 - protein, 220 aa, Mus musculus; identical to SEQ ID NO: 957

SEQ ID NO: 4162 - protein, 233 aa, synthetic construct; identical to SEQ ID NO: 958
  REGION 1..233: note = Description of Artificial Sequence: Synthetic Antibody variable domain

SEQ ID NO: 4163 - protein, 467 aa, synthetic construct; identical to SEQ ID NO: 959
  REGION 1..467: note = Description of Artificial Sequence: Synthetic Antibody variable domain

SEQ ID NO: 4164 - protein, 219 aa, synthetic construct; identical to SEQ ID NO: 960
  REGION 1..219: note = Description of Artificial Sequence: Synthetic Antibody variable domain

SEQ ID NO: 4165 - protein, 234 aa, synthetic construct; identical to SEQ ID NO: 961
  REGION 1..234: note = Description of Artificial Sequence: Synthetic Antibody variable domain

SEQ ID NO: 4166 - protein, 450 aa, synthetic construct; identical to SEQ ID NO: 962
  REGION 1..450: note = Description of Artificial Sequence: Synthetic Antibody variable domain

SEQ ID NO: 4167 - protein, 450 aa, synthetic construct; identical to SEQ ID NO: 963
  REGION 1..450: note = Description of Artificial Sequence: Synthetic Antibody variable domain

SEQ ID NO: 4168 - protein, 214 aa, synthetic construct; identical to SEQ ID NO: 964
  REGION 1..214: note = Description of Artificial Sequence: Synthetic Antibody variable domain

SEQ ID NO: 4169 - protein, 129 aa, synthetic construct; identical to SEQ ID NO: 965
  REGION 1..129: note = Description of Artificial Sequence: Synthetic Antibody variable domain

SEQ ID NO: 4170 - protein, 111 aa, synthetic construct; identical to SEQ ID NO: 966
  REGION 1..111: note = Description of Artificial Sequence: Synthetic Antibody variable domain

SEQ ID NO: 4171 - protein, 121 aa, synthetic construct; identical to SEQ ID NO: 967
  REGION 1..121: note = Description of Artificial Sequence: Synthetic Antibody variable domain

SEQ ID NO: 4172 - protein, 107 aa, synthetic construct; identical to SEQ ID NO: 968
  REGION 1..107: note = Description of Artificial Sequence: Synthetic Antibody variable domain

SEQ ID NO: 4173 - protein, 451 aa, synthetic construct; identical to SEQ ID NO: 969
  REGION 1..451: note = Description of Artificial Sequence: Synthetic Antibody variable domain

SEQ ID NO: 4174 - protein, 469 aa, synthetic construct; identical to SEQ ID NO: 970
  REGION 1..469: note = Description of Artificial Sequence: Synthetic Antibody variable domain

SEQ ID NO: 4175 - protein, 233 aa, synthetic construct; identical to SEQ ID NO: 971
  REGION 1..233: note = Description of Artificial Sequence: Synthetic Antibody variable domain

SEQ ID NO: 4176 - protein, 450 aa, synthetic construct; identical to SEQ ID NO: 972
  REGION 1..450: note = Description of Artificial Sequence: Synthetic Antibody variable domain

SEQ ID NO: 4177 - protein, 263 aa, synthetic construct; identical to SEQ ID NO: 973
  REGION 1..263: note = Description of Artificial Sequence: Synthetic scFv

SEQ ID NO: 4178 - protein, 242 aa, synthetic construct; identical to SEQ ID NO: 974
  REGION 1..242: note = Description of Artificial Sequence: Synthetic scFv

SEQ ID NO: 4179 - protein, 477 aa, synthetic construct; identical to SEQ ID NO: 975
  REGION 1..477: note = Description of Artificial Sequence: Synthetic scFv

SEQ ID NO: 4180 - protein, 291 aa, synthetic construct; identical to SEQ ID NO: 976
  REGION 1..291: note = Description of Artificial Sequence: Synthetic scFv

SEQ ID NO: 4181 - protein, 291 aa, synthetic construct; identical to SEQ ID NO: 977
  REGION 1..291: note = Description of Artificial Sequence: Synthetic scFv

SEQ ID NO: 4182 - protein, 665 aa, synthetic construct; identical to SEQ ID NO: 978
  REGION 1..665: note = Description of Artificial Sequence: Synthetic scFv

SEQ ID NO: 4183 - protein, 278 aa, synthetic construct; identical to SEQ ID NO: 979
  REGION 1..278: note = Description of Artificial Sequence: Synthetic scFv

SEQ ID NO: 4184 - protein, 280 aa, synthetic construct; identical to SEQ ID NO: 980
  REGION 1..280: note = Description of Artificial Sequence: Synthetic scFv

SEQ ID NO: 4185 - protein, 268 aa, synthetic construct; identical to SEQ ID NO: 1146
  REGION 1..268: note = Description of Artificial Sequence: Synthetic Construct

SEQ ID NO: 4186 - protein, 153 aa, synthetic construct; identical to SEQ ID NO: 1147
  REGION 1..153: note = Description of Artificial Sequence: Synthetic Construct

SEQ ID NO: 4187 - protein, 319 aa, synthetic construct; identical to SEQ ID NO: 1148
  REGION 1..319: note = Description of Artificial Sequence: Synthetic Construct

SEQ ID NO: 4188 - protein, 528 aa, synthetic construct; identical to SEQ ID NO: 1149
  REGION 1..528: note = Description of Artificial Sequence: Synthetic Payload

SEQ ID NO: 4189 - protein, 579 aa, synthetic construct; identical to SEQ ID NO: 1150
  REGION 1..579: note = Description of Artificial Sequence: Synthetic Payload

SEQ ID NO: 4190 - protein, 607 aa, synthetic construct; identical to SEQ ID NO: 1151
  REGION 1..607: note = Description of Artificial Sequence: Synthetic Payload

SEQ ID NO: 4191 - protein, 607 aa, synthetic construct; identical to SEQ ID NO: 1152
  REGION 1..607: note = Description of Artificial Sequence: Synthetic Payload

SEQ ID NO: 4192 - protein, 607 aa, synthetic construct; identical to SEQ ID NO: 1153
  REGION 1..607: note = Description of Artificial Sequence: Synthetic Payload

SEQ ID NO: 4193 - protein, 413 aa, synthetic construct; identical to SEQ ID NO: 1154
  REGION 1..413: note = Description of Artificial Sequence: Synthetic Payload

SEQ ID NO: 4194 - protein, 525 aa, synthetic construct; identical to SEQ ID NO: 1155
  REGION 1..525: note = Description of Artificial Sequence: Synthetic Payload

SEQ ID NO: 4195 - protein, 576 aa, synthetic construct; identical to SEQ ID NO: 1156
  REGION 1..576: note = Description of Artificial Sequence: Synthetic Payload

SEQ ID NO: 4196 - protein, 576 aa, synthetic construct; identical to SEQ ID NO: 1157
  REGION 1..576: note = Description of Artificial Sequence: Synthetic Payload

SEQ ID NO: 4197 - protein, 431 aa, synthetic construct; identical to SEQ ID NO: 745
  REGION 1..431: note = Description of Artificial Sequence: Synthetic Payload

SEQ ID NO: 4198 - protein, 396 aa, synthetic construct; identical to SEQ ID NO: 747
  REGION 1..396: note = Description of Artificial Sequence: Synthetic Construct

SEQ ID NO: 4199 - protein, 543 aa, synthetic construct; identical to SEQ ID NO: 1160
  REGION 1..543: note = Description of Artificial Sequence: Synthetic Construct

SEQ ID NO: 4200 - protein, 594 aa, synthetic construct; identical to SEQ ID NO: 1161
  REGION 1..594: note = Description of Artificial Sequence: Synthetic Construct

SEQ ID NO: 4201 - protein, 540 aa, synthetic construct; identical to SEQ ID NO: 1162
  REGION 1..540: note = Description of Artificial Sequence: Synthetic Construct

SEQ ID NO: 4202 - protein, 591 aa, synthetic construct; identical to SEQ ID NO: 1163
  REGION 1..591: note = Description of Artificial Sequence: Synthetic Construct

SEQ ID NO: 4203 - protein, 505 aa, synthetic construct; identical to SEQ ID NO: 1164
  REGION 1..505: note = Description of Artificial Sequence: Synthetic Construct

SEQ ID NO: 4204 - protein, 556 aa, synthetic construct; identical to SEQ ID NO: 1165
  REGION 1..556: note = Description of Artificial Sequence: Synthetic Construct

SEQ ID NO: 4205 - protein, 505 aa, synthetic construct; identical to SEQ ID NO: 1166
  REGION 1..505: note = Description of Artificial Sequence: Synthetic Construct

SEQ ID NO: 4206 - protein, 556 aa, synthetic construct; identical to SEQ ID NO: 1167
  REGION 1..556: note = Description of Artificial Sequence: Synthetic Construct

SEQ ID NO: 4207 - protein, 490 aa, synthetic construct; identical to SEQ ID NO: 1168
  REGION 1..490: note = Description of Artificial Sequence: Synthetic Construct

SEQ ID NO: 4208 - protein, 599 aa, synthetic construct; identical to SEQ ID NO: 1169
  REGION 1..599: note = Description of Artificial Sequence: Synthetic Construct

SEQ ID NO: 4209 - protein, 650 aa, synthetic construct; identical to SEQ ID NO: 1170
  REGION 1..650: note = Description of Artificial Sequence: Synthetic Construct

SEQ ID NO: 4210 - protein, 686 aa, synthetic construct; identical to SEQ ID NO: 1171
  REGION 1..686: note = Description of Artificial Sequence: Synthetic Construct

SEQ ID NO: 4211 - protein, 107 aa, Homo sapiens; identical to SEQ ID NO: 192

SEQ ID NO: 4212 - protein, 159 aa, Escherichia coli [sequence omitted]

SEQ ID NO: 4213 - protein, 187 aa, Homo sapiens; identical to SEQ ID NO: 1

SEQ ID NO: 4214 - protein, 327 aa, Homo sapiens; identical to SEQ ID NO: 195

SEQ ID NO: 4215 - protein, 189 aa, Homo sapiens; identical to SEQ ID NO: 196

SEQ ID NO: 4216 - protein, 260 aa, Homo sapiens; identical to SEQ ID NO: 197

SEQ ID NO: 4217 - protein, 231 aa, Homo sapiens; identical to SEQ ID NO: 198

SEQ ID NO: 4218 - protein, 67 aa, Homo sapiens; identical to SEQ ID NO: 3093

SEQ ID NO: 4219 - protein, 159 aa, Escherichia coli [sequence omitted]

SEQ ID NO: 4220 - protein, 107 aa, Homo sapiens; identical to SEQ ID NO: 192

SEQ ID NO: 4221 - protein, 159 aa, Escherichia coli [sequence omitted]

SEQ ID NO: 4222 - protein, 107 aa, Homo sapiens; identical to SEQ ID NO: 192

SEQ ID NO: 4223 - DNA, 561 bp, Homo sapiens; identical to SEQ ID NO: 1178
  source 1..561: mol_type = other DNA

SEQ ID NO: 4224 - DNA, 477 bp, synthetic construct; identical to SEQ ID NO: 1180
  misc_feature 1..477: note = Description of Artificial Sequence: Synthetic Destabilizing Domain (DD)
  source 1..477: mol_type = other DNA

SEQ ID NO: 4225 - DNA, 717 bp, synthetic construct; identical to SEQ ID NO: 1182
  misc_feature 1..717: note = Description of Artificial Sequence: Synthetic polynucleotide
  source 1..717: mol_type = other DNA

SEQ ID NO: 4226 - DNA, 18 bp, synthetic construct
  misc_feature 1..18: note = Description of Artificial Sequence: Synthetic oligonucleotide
  source 1..18: mol_type = other DNA
ggtggctctggtggtggt

SEQ ID NO: 4227 - DNA, 18 bp, synthetic construct
  misc_feature 1..18: note = Description of Artificial Sequence: Synthetic oligonucleotide
  source 1..18: mol_type = other DNA
ggaggtagtggtggaggc

SEQ ID NO: 4228 - DNA, 1305 bp, synthetic construct; identical to SEQ ID NO: 142
  misc_feature 1..1305: note = Description of Artificial Sequence: Synthetic polynucleotide
  source 1..1305: mol_type = other DNA

SEQ ID NO: 4229 - DNA, 1302 bp, synthetic construct; identical to SEQ ID NO: 143
  misc_feature 1..1302: note = Description of Artificial Sequence: Synthetic polynucleotide
  source 1..1302: mol_type = other DNA

SEQ ID NO: 4230 - DNA, 1215 bp, synthetic construct; identical to SEQ ID NO: 144
  misc_feature 1..1215: note = Description of Artificial Sequence: Synthetic polynucleotide
  source 1..1215: mol_type = other DNA

SEQ ID NO: 4231 - protein, 187 aa, Homo sapiens; identical to SEQ ID NO: 1

SEQ ID NO: 4232 - DNA, 561 bp, Homo sapiens; identical to SEQ ID NO: 1178
  source 1..561: mol_type = other DNA

SEQ ID NO: 4233 - protein, 135 aa, Homo sapiens
MGKKTWFSIPEKNRPLKGRINLVLSRELKEPPQGAHFLSRSLDDALKLTEQPELANKVDMVWIVGGSSVYKEAMNHPGHLKLFVTRIMQDFESDTFFPEIDLEKYKLLPEYPGVLSDVQEEKGIKYKFEVYEKND

SEQ ID NO: 4234 - DNA, 406 bp, Homo sapiens; identical to SEQ ID NO: 1189
  source 1..406: mol_type = other DNA

SEQ ID NO: 4235 - protein, 129 aa, Homo sapiens; identical to SEQ ID NO: 1190

SEQ ID NO: 4236 - DNA, 389 bp, Homo sapiens; identical to SEQ ID NO: 1191
  source 1..389: mol_type = other DNA

SEQ ID NO: 4237 - protein, 97 aa, Homo sapiens [sequence omitted]

SEQ ID NO: 4238 - protein, 187 aa, Homo sapiens; identical to SEQ ID NO: 1193

SEQ ID NO: 4239 - DNA, 554 bp, Homo sapiens; identical to SEQ ID NO: 1194
  source 1..554: mol_type = other DNA

SEQ ID NO: 4240 - DNA, 561 bp, synthetic construct; identical to SEQ ID NO: 73
  misc_feature 1..561: note = Description of Artificial Sequence: Synthetic Destabilizing Domain (DD)
  source 1..561: mol_type = other DNA

SEQ ID NO: 4241 - DNA, 561 bp, synthetic construct; identical to SEQ ID NO: 72
  misc_feature 1..561: note = Description of Artificial Sequence: Synthetic Destabilizing Domain (DD)
  source 1..561: mol_type = other DNA

SEQ ID NO: 4242 - DNA, 561 bp, synthetic construct; identical to SEQ ID NO: 74
  misc_feature 1..561: note = Description of Artificial Sequence: Synthetic Destabilizing Domain (DD)
  source 1..561: mol_type = other DNA

SEQ ID NO: 4243 - DNA, 558 bp, synthetic construct; identical to SEQ ID NO: 87
  misc_feature 1..558: note = Description of Artificial Sequence: Synthetic Destabilizing Domain (DD)
  source 1..558: mol_type = other DNA

SEQ ID NO: 4244 - DNA, 561 bp, synthetic construct; identical to SEQ ID NO: 75
  misc_feature 1..561: note = Description of Artificial Sequence: Synthetic Destabilizing Domain (DD)
  source 1..561: mol_type = other DNA

SEQ ID NO: 4245 - DNA, 558 bp, synthetic construct; identical to SEQ ID NO: 88
  misc_feature 1..558: note = Description of Artificial Sequence: Synthetic Destabilizing Domain (DD)
  source 1..558: mol_type = other DNA

SEQ ID NO: 4246 - DNA, 561 bp, synthetic construct; identical to SEQ ID NO: 76
  misc_feature 1..561: note = Description of Artificial Sequence: Synthetic Destabilizing Domain (DD)
  source 1..561: mol_type = other DNA

SEQ ID NO: 4247 - DNA, 561 bp, synthetic construct; identical to SEQ ID NO: 77
  misc_feature 1..561: note = Description of Artificial Sequence: Synthetic Destabilizing Domain (DD)
  source 1..561: mol_type = other DNA

SEQ ID NO: 4248 - DNA, 561 bp, synthetic construct; identical to SEQ ID NO: 78
  misc_feature 1..561: note = Description of Artificial Sequence: Synthetic Destabilizing Domain (DD)
  source 1..561: mol_type = other DNA

SEQ ID NO: 4249 - DNA, 558 bp, synthetic construct; identical to SEQ ID NO: 89
  misc_feature 1..558: note = Description of Artificial Sequence: Synthetic Destabilizing Domain (DD)
  source 1..558: mol_type = other DNA

SEQ ID NO: 4250 - DNA, 561 bp, synthetic construct; identical to SEQ ID NO: 79
  misc_feature 1..561: note = Description of Artificial Sequence: Synthetic Destabilizing Domain (DD)
  source 1..561: mol_type = other DNA

SEQ ID NO: 4251 - DNA, 558 bp, synthetic construct; identical to SEQ ID NO: 132
  misc_feature 1..558: note = Description of Artificial Sequence: Synthetic Destabilizing Domain (DD)
  source 1..558: mol_type = other DNA

SEQ ID NO: 4252 - DNA, 561 bp, synthetic construct; identical to SEQ ID NO: 80
  misc_feature 1..561: note = Description of Artificial Sequence: Synthetic Destabilizing Domain (DD)
  source 1..561: mol_type = other DNA

SEQ ID NO: 4253 - DNA, 558 bp, synthetic construct; identical to SEQ ID NO: 133
  misc_feature 1..558: note = Description of Artificial Sequence: Synthetic Destabilizing Domain (DD)
  source 1..558: mol_type = other DNA

SEQ ID NO: 4254 - DNA, 561 bp, synthetic construct; identical to SEQ ID NO: 81
  misc_feature 1..561: note = Description of Artificial Sequence: Synthetic Destabilizing Domain (DD)
  source 1..561: mol_type = other DNA

SEQ ID NO: 4255 - DNA, 558 bp, synthetic construct; identical to SEQ ID NO: 134
  misc_feature 1..558: note = Description of Artificial Sequence: Synthetic Destabilizing Domain (DD)
  source 1..558: mol_type = other DNA

SEQ ID NO: 4256 - DNA, 561 bp, synthetic construct; identical to SEQ ID NO: 82
  misc_feature 1..561: note = Description of Artificial Sequence: Synthetic Destabilizing Domain (DD)
  source 1..561: mol_type = other DNA

SEQ ID NO: 4257 - DNA, 561 bp, synthetic construct; identical to SEQ ID NO: 83
  misc_feature 1..561: note = Description of Artificial Sequence: Synthetic Destabilizing Domain (DD)
  source 1..561: mol_type = other DNA

SEQ ID NO: 4258 - DNA, 561 bp, synthetic construct; identical to SEQ ID NO: 83
  misc_feature 1..561: note = Description of Artificial Sequence: Synthetic Destabilizing Domain (DD)
  source 1..561: mol_type = other DNA

SEQ ID NO: 4259 - DNA, 561 bp, synthetic construct; identical to SEQ ID NO: 84
  misc_feature 1..561: note = Description of Artificial Sequence: Synthetic Destabilizing Domain (DD)
  source 1..561: mol_type = other DNA

SEQ ID NO: 4260 - DNA, 561 bp, synthetic construct; identical to SEQ ID NO: 85
  misc_feature 1..561: note = Description of Artificial Sequence: Synthetic Destabilizing Domain (DD)
  source 1..561: mol_type = other DNA

SEQ ID NO: 4261 - DNA, 561 bp, synthetic construct; identical to SEQ ID NO: 135
  misc_feature 1..561: note = Description of Artificial Sequence: Synthetic Destabilizing Domain (DD)
  source 1..561: mol_type = other DNA

SEQ ID NO: 4262 - DNA, 558 bp, synthetic construct; identical to SEQ ID NO: 86
  misc_feature 1..558: note = Description of Artificial Sequence: Synthetic Destabilizing Domain (DD)
  source 1..558: mol_type = other DNA

SEQ ID NO: 4263 - DNA, 561 bp, synthetic construct; identical to SEQ ID NO: 90
  misc_feature 1..561: note = Description of Artificial Sequence: Synthetic Destabilizing Domain (DD)
  source 1..561: mol_type = other DNA

SEQ ID NO: 4264 - DNA, 561 bp, synthetic construct; identical to SEQ ID NO: 91
  misc_feature 1..561: note = Description of Artificial Sequence: Synthetic Destabilizing Domain (DD)
  source 1..561: mol_type = other DNA

SEQ ID NO: 4265 - DNA, 561 bp, synthetic construct; identical to SEQ ID NO: 92
  misc_feature 1..561: note = Description of Artificial Sequence: Synthetic Destabilizing Domain (DD)
  source 1..561: mol_type = other DNA

SEQ ID NO: 4266 - DNA, 561 bp, synthetic construct; identical to SEQ ID NO: 93
  misc_feature 1..561: note = Description of Artificial Sequence: Synthetic Destabilizing Domain (DD)
  source 1..561: mol_type = other DNA

SEQ ID NO: 4267 - DNA, 561 bp, synthetic construct; identical to SEQ ID NO: 94
  misc_feature 1..561: note = Description of Artificial Sequence: Synthetic Destabilizing Domain (DD)
  source 1..561: mol_type = other DNA

SEQ ID NO: 4268 - DNA, 561 bp, synthetic construct; identical to SEQ ID NO: 95
  misc_feature 1..561: note = Description of Artificial Sequence: Synthetic Destabilizing Domain (DD)
  source 1..561: mol_type = other DNA

SEQ ID NO: 4269 - DNA, 561 bp, synthetic construct; identical to SEQ ID NO: 96
  misc_feature 1..561: note = Description of Artificial Sequence: Synthetic Destabilizing Domain (DD)
  source 1..561: mol_type = other DNA

SEQ ID NO: 4270 - DNA, 561 bp, synthetic construct; identical to SEQ ID NO: 97
  misc_feature 1..561: note = Description of Artificial Sequence: Synthetic Destabilizing Domain (DD)
  source 1..561: mol_type = other DNA

SEQ ID NO: 4271 - DNA, 561 bp, synthetic construct; identical to SEQ ID NO: 98
  misc_feature 1..561: note = Description of Artificial Sequence: Synthetic Destabilizing Domain (DD)
  source 1..561: mol_type = other DNA

SEQ ID NO: 4272 - DNA, 561 bp, synthetic construct; identical to SEQ ID NO: 99
  misc_feature 1..561: note = Description of Artificial Sequence: Synthetic Destabilizing Domain (DD)
  source 1..561: mol_type = other DNA

SEQ ID NO: 4273 - DNA, 561 bp, synthetic construct; identical to SEQ ID NO: 100
  misc_feature 1..561: note = Description of Artificial Sequence: Synthetic Destabilizing Domain (DD)
  source 1..561: mol_type = other DNA

SEQ ID NO: 4274 - DNA, 561 bp, synthetic construct; identical to SEQ ID NO: 101
  misc_feature 1..561: note = Description of Artificial Sequence: Synthetic Destabilizing Domain (DD)
  source 1..561: mol_type = other DNA

SEQ ID NO: 4275 - DNA, 561 bp, synthetic construct; identical to SEQ ID NO: 102
  misc_feature 1..561: note = Description of Artificial Sequence: Synthetic Destabilizing Domain (DD)
  source 1..561: mol_type = other DNA

SEQ ID NO: 4276 - DNA, 561 bp, synthetic construct; identical to SEQ ID NO: 103
  misc_feature 1..561: note = Description of Artificial Sequence: Synthetic Destabilizing Domain (DD)
  source 1..561: mol_type = other DNA

SEQ ID NO: 4277 - DNA, 561 bp, synthetic construct; identical to SEQ ID NO: 104
  misc_feature 1..561: note = Description of Artificial Sequence: Synthetic Destabilizing Domain (DD)
  source 1..561: mol_type = other DNA

SEQ ID NO: 4278 - DNA, 561 bp, synthetic construct; identical to SEQ ID NO: 105
  misc_feature 1..561: note = Description of Artificial Sequence: Synthetic Destabilizing Domain (DD)
  source 1..561: mol_type = other DNA

SEQ ID NO: 4279 - DNA, 561 bp, synthetic construct; identical to SEQ ID NO: 106
  misc_feature 1..561: note = Description of Artificial Sequence: Synthetic Destabilizing Domain (DD)
  source 1..561: mol_type = other DNA

SEQ ID NO: 4280 - DNA, 561 bp, synthetic construct; identical to SEQ ID NO: 107
  misc_feature 1..561: note = Description of Artificial Sequence: Synthetic Destabilizing Domain (DD)
  source 1..561: mol_type = other DNA

SEQ ID NO: 4281 - DNA, 561 bp, synthetic construct; identical to SEQ ID NO: 108
  misc_feature 1..561: note = Description of Artificial Sequence: Synthetic Destabilizing Domain (DD)
  source 1..561: mol_type = other DNA

SEQ ID NO: 4282 - DNA, 561 bp, synthetic construct; identical to SEQ ID NO: 109
  misc_feature 1..561: note = Description of Artificial Sequence: Synthetic Destabilizing Domain (DD)
  source 1..561: mol_type = other DNA

SEQ ID NO: 4283 - DNA, 561 bp, synthetic construct; identical to SEQ ID NO: 110
  misc_feature 1..561: note = Description of Artificial Sequence: Synthetic Destabilizing Domain (DD)
  source 1..561: mol_type = other DNA

SEQ ID NO: 4284 - DNA, 561 bp, synthetic construct; identical to SEQ ID NO: 111
  misc_feature 1..561: note = Description of Artificial Sequence: Synthetic Destabilizing Domain (DD)
  source 1..561: mol_type = other DNA

SEQ ID NO: 4285 - DNA, 561 bp, synthetic construct; identical to SEQ ID NO: 112
  misc_feature 1..561: note = Description of Artificial Sequence: Synthetic Destabilizing Domain (DD)
  source 1..561: mol_type = other DNA

SEQ ID NO: 4286 - DNA, 561 bp, synthetic construct; identical to SEQ ID NO: 113
  misc_feature 1..561: note = Description of Artificial Sequence: Synthetic Destabilizing Domain (DD)
  source 1..561: mol_type = other DNA

SEQ ID NO: 4287 - DNA, 561 bp, synthetic construct; identical to SEQ ID NO: 114
  misc_feature 1..561: note = Description of Artificial Sequence: Synthetic Destabilizing Domain (DD)
  source 1..561: mol_type = other DNA

SEQ ID NO: 4288 - DNA, 561 bp, synthetic construct; identical to SEQ ID NO: 115
  misc_feature 1..561: note = Description of Artificial Sequence: Synthetic Destabilizing Domain (DD)
  source 1..561: mol_type = other DNA

SEQ ID NO: 4289 - DNA, 561 bp, synthetic construct; identical to SEQ ID NO: 116
  misc_feature 1..561: note = Description of Artificial Sequence: Synthetic Destabilizing Domain (DD)
  source 1..561: mol_type = other DNA

SEQ ID NO: 4290 - DNA, 561 bp, synthetic construct; identical to SEQ ID NO: 117
  misc_feature 1..561: note = Description of Artificial Sequence: Synthetic Destabilizing Domain (DD)
  source 1..561: mol_type = other DNA

SEQ ID NO: 4291 - DNA, 561 bp, synthetic construct; identical to SEQ ID NO: 118
  misc_feature 1..561: note = Description of Artificial Sequence: Synthetic Destabilizing Domain (DD)
  source 1..561: mol_type = other DNA

SEQ ID NO: 4292 - DNA, 561 bp, synthetic construct; identical to SEQ ID NO: 119
  misc_feature 1..561: note = Description of Artificial Sequence: Synthetic Destabilizing Domain (DD)
  source 1..561: mol_type = other DNA

SEQ ID NO: 4293 - DNA, 561 bp, synthetic construct; identical to SEQ ID NO: 120
  misc_feature 1..561: note = Description of Artificial Sequence: Synthetic Destabilizing Domain (DD)
  source 1..561: mol_type = other DNA

SEQ ID NO: 4294 - DNA, 561 bp, synthetic construct; identical to SEQ ID NO: 121
  misc_feature 1..561: note = Description of Artificial Sequence: Synthetic Destabilizing Domain (DD)
  source 1..561: mol_type = other DNA

SEQ ID NO: 4295 - DNA, 561 bp, synthetic construct; identical to SEQ ID NO: 122
  misc_feature 1..561: note = Description of Artificial Sequence: Synthetic Destabilizing Domain (DD)
  source 1..561: mol_type = other DNA

SEQ ID NO: 4296 - DNA, 561 bp, synthetic construct; identical to SEQ ID NO: 123
  misc_feature 1..561: note = Description of Artificial Sequence: Synthetic Destabilizing Domain (DD)
  source 1..561: mol_type = other DNA

SEQ ID NO: 4297 - DNA, 561 bp, synthetic construct; identical to SEQ ID NO: 124
  misc_feature 1..561: note = Description of Artificial Sequence: Synthetic Destabilizing Domain (DD)
  source 1..561: mol_type = other DNA

SEQ ID NO: 4298 - DNA, 558 bp, synthetic construct; identical to SEQ ID NO: 125
  misc_feature 1..558: note = Description of Artificial Sequence: Synthetic Destabilizing Domain (DD)
  source 1..558: mol_type = other DNA

SEQ ID NO: 4299 - protein, 186 aa, synthetic construct; identical to SEQ ID NO: 33
  REGION 1..186: note = Description of Artificial Sequence: Synthetic Destabilizing Domain (DD)

SEQ ID NO: 4300 - DNA, 558 bp, synthetic construct; identical to SEQ ID NO: 126
  misc_feature 1..558: note = Description of Artificial Sequence: Synthetic Destabilizing Domain (DD)
  source 1..558: mol_type = other DNA

SEQ ID NO: 4301 - protein, 187 aa, synthetic construct; identical to SEQ ID NO: 18
  REGION 1..187: note = Description of Artificial Sequence: Synthetic Destabilizing Domain (DD)

SEQ ID NO: 4302 - DNA, 561 bp, synthetic construct; identical to SEQ ID NO: 136
  misc_feature 1..561: note = Description of Artificial Sequence: Synthetic Destabilizing Domain (DD)
  source 1..561: mol_type = other DNA

SEQ ID NO: 4303 - protein, 186 aa, synthetic construct; identical to SEQ ID NO: 42
  REGION 1..186: note = Description of Artificial Sequence: Synthetic Destabilizing Domain (DD)

SEQ ID NO: 4304 - DNA, 558 bp, synthetic construct; identical to SEQ ID NO: 127
  misc_feature 1..558: note = Description of Artificial Sequence: Synthetic Destabilizing Domain (DD)
  source 1..558: mol_type = other DNA

SEQ ID NO: 4305 - protein, 187 aa, synthetic construct; identical to SEQ ID NO: 29
  REGION 1..187: note = Description of Artificial Sequence: Synthetic Destabilizing Domain (DD)

SEQ ID NO: 4306 - DNA, 561 bp, synthetic construct; identical to SEQ ID NO: 137
  misc_feature 1..561: note = Description of Artificial Sequence: Synthetic Destabilizing Domain (DD)
  source 1..561: mol_type = other DNA

SEQ ID NO: 4307 - protein, 186 aa, synthetic construct; identical to SEQ ID NO: 37
  REGION 1..186: note = Description of Artificial Sequence: Synthetic Destabilizing Domain (DD)

SEQ ID NO: 4308 - DNA, 558 bp, synthetic construct; identical to SEQ ID NO: 128
  misc_feature 1..558: note = Description of Artificial Sequence: Synthetic Destabilizing Domain (DD)
  source 1..558: mol_type = other DNA

SEQ ID NO: 4309 - protein, 187 aa, synthetic construct; identical to SEQ ID NO: 22
  REGION 1..187: note = Description of Artificial Sequence: Synthetic Destabilizing Domain (DD)

SEQ ID NO: 4310 - DNA, 561 bp, synthetic construct; identical to SEQ ID NO: 138
  misc_feature 1..561: note = Description of Artificial Sequence: Synthetic Destabilizing Domain (DD)
  source 1..561: mol_type = other DNA

SEQ ID NO: 4311 - protein, 186 aa, synthetic construct; identical to SEQ ID NO: 1196
  REGION 1..186: note = Description of Artificial Sequence: Synthetic Destabilizing Domain (DD)

SEQ ID NO: 4312 - DNA, 558 bp, synthetic construct; identical to SEQ ID NO: 129
  misc_feature 1..558: note = Description of Artificial Sequence: Synthetic Destabilizing Domain (DD)
  source 1..558: mol_type = other DNA

SEQ ID NO: 4313 - protein, 187 aa, synthetic construct; identical to SEQ ID NO: 53
  REGION 1..187: note = Description of Artificial Sequence: Synthetic Destabilizing Domain (DD)

SEQ ID NO: 4314 - DNA, 561 bp, synthetic construct; identical to SEQ ID NO: 139
  misc_feature 1..561: note = Description of Artificial Sequence: Synthetic Destabilizing Domain (DD)
  source 1..561: mol_type = other DNA

SEQ ID NO: 4315 - protein, 159 aa, Escherichia coli [sequence omitted]

SEQ ID NO: 4316 - protein, 107 aa, Homo sapiens; identical to SEQ ID NO: 192

SEQ ID NO: 4317 - protein, 187 aa, Homo sapiens; identical to SEQ ID NO: 1

SEQ ID NO: 4318 - protein, 187 aa, Homo sapiens; identical to SEQ ID NO: 1

SEQ ID NO: 4319 - protein, 186 aa, synthetic construct; identical to SEQ ID NO: 61
  REGION 1..186: note = Description of Artificial Sequence: Synthetic Destabilizing Domain (DD)

SEQ ID NO: 4320 - DNA, 558 bp, synthetic construct; identical to SEQ ID NO: 130
  misc_feature 1..558: note = Description of Artificial Sequence: Synthetic Destabilizing Domain (DD)
  source 1..558: mol_type = other DNA

SEQ ID NO: 4321 - protein, 187 aa, synthetic construct; identical to SEQ ID NO: 60
  REGION 1..187: note = Description of Artificial Sequence: Synthetic Destabilizing Domain (DD)

SEQ ID NO: 4322 - DNA, 561 bp, synthetic construct; identical to SEQ ID NO: 140
  misc_feature 1..561: note = Description of Artificial Sequence: Synthetic Destabilizing Domain (DD)
  source 1..561: mol_type = other DNA

SEQ ID NO: 4323 - protein, 186 aa, synthetic construct; identical to SEQ ID NO: 55
  REGION 1..186: note = Description of Artificial Sequence: Synthetic Destabilizing Domain (DD)

SEQ ID NO: 4324 - DNA, 558 bp, synthetic construct; identical to SEQ ID NO: 131
  misc_feature 1..558: note = Description of Artificial Sequence: Synthetic Destabilizing Domain (DD)
  source 1..558: mol_type = other DNA

SEQ ID NO: 4325 - protein, 187 aa, synthetic construct; identical to SEQ ID NO: 43
  REGION 1..187: note = Description of Artificial Sequence: Synthetic Destabilizing Domain (DD)

SEQ ID NO: 4326 - DNA, 561 bp, synthetic construct; identical to SEQ ID NO: 141
  misc_feature 1..561: note = Description of Artificial Sequence: Synthetic Destabilizing Domain (DD)
  source 1..561: mol_type = other DNA

SEQ ID NO: 4327 - protein, 239 aa, synthetic construct; identical to SEQ ID NO: 1181
  REGION 1..239: note = Description of Artificial Sequence: Synthetic polypeptide

SEQ ID NO: 4328 - protein, 550 aa, synthetic construct; identical to SEQ ID NO: 58
  REGION 1..550: note = Description of Artificial Sequence: Synthetic Payload

SEQ ID NO: 4329 - DNA, 1650 bp, synthetic construct; identical to SEQ ID NO: 1261
  misc_feature 1..1650: note = Description of Artificial Sequence: Synthetic Payload
  source 1..1650: mol_type = other DNA

SEQ ID NO: 4330 - protein, 6 aa, synthetic construct
  REGION 1..6: note = Description of Artificial Sequence: Synthetic Linker
GGSGGG

SEQ ID NO: 4331 - DNA, 1305 bp, synthetic construct; identical to SEQ ID NO: 142
  misc_feature 1..1305: note = Description of Artificial Sequence: Synthetic polynucleotide
  source 1..1305: mol_type = other DNA

SEQ ID NO: 4332 - DNA, 1305 bp, synthetic construct; identical to SEQ ID NO: 145
  misc_feature 1..1305: note = Description of Artificial Sequence: Synthetic polynucleotide
  source 1..1305: mol_type = other DNA

SEQ ID NO: 4333 - DNA, 1305 bp, synthetic construct; identical to SEQ ID NO: 146
  misc_feature 1..1305: note = Description of Artificial Sequence: Synthetic polynucleotide
  source 1..1305: mol_type = other DNA

SEQ ID NO: 4334 - DNA, 1305 bp, synthetic construct; identical to SEQ ID NO: 147
  misc_feature 1..1305: note = Description of Artificial Sequence: Synthetic polynucleotide
  source 1..1305: mol_type = other DNA

SEQ ID NO: 4335 - DNA, 1305 bp, synthetic construct; identical to SEQ ID NO: 148
  misc_feature 1..1305: note = Description of Artificial Sequence: Synthetic polynucleotide
  source 1..1305: mol_type = other DNA

SEQ ID NO: 4336 - DNA, 1305 bp, synthetic construct; identical to SEQ ID NO: 149
  misc_feature 1..1305: note = Description of Artificial Sequence: Synthetic polynucleotide
  source 1..1305: mol_type = other DNA

SEQ ID NO: 4337 - DNA, 1305 bp, synthetic construct; identical to SEQ ID NO: 150
  misc_feature 1..1305: note = Description of Artificial Sequence: Synthetic polynucleotide
  source 1..1305: mol_type = other DNA

SEQ ID NO: 4338 - DNA, 1305 bp, synthetic construct; identical to SEQ ID NO: 151
  misc_feature 1..1305: note = Description of Artificial Sequence: Synthetic polynucleotide
  source 1..1305: mol_type = other DNA

SEQ ID NO: 4339 - DNA, 1305 bp, synthetic construct; identical to SEQ ID NO: 152
  misc_feature 1..1305: note = Description of Artificial Sequence: Synthetic polynucleotide
  source 1..1305: mol_type = other DNA

SEQ ID NO: 4340 - DNA, 1305 bp, synthetic construct; identical to SEQ ID NO: 153
  misc_feature 1..1305: note = Description of Artificial Sequence: Synthetic polynucleotide
  source 1..1305: mol_type = other DNA

SEQ ID NO: 4341 - DNA, 1305 bp, synthetic construct; identical to SEQ ID NO: 154
  misc_feature 1..1305: note = Description of Artificial Sequence: Synthetic polynucleotide
  source 1..1305: mol_type = other DNA

SEQ ID NO: 4342 - DNA, 1302 bp, synthetic construct; identical to SEQ ID NO: 143
  misc_feature 1..1302: note = Description of Artificial Sequence: Synthetic polynucleotide
  source 1..1302: mol_type = other DNA

SEQ ID NO: 4343 - DNA, 1302 bp, synthetic construct; identical to SEQ ID NO: 155
  misc_feature 1..1302: note = Description of Artificial Sequence: Synthetic polynucleotide
  source 1..1302: mol_type = other DNA

SEQ ID NO: 4344 - DNA, 1302 bp, synthetic construct; identical to SEQ ID NO: 156
  misc_feature 1..1302: note = Description of Artificial Sequence: Synthetic polynucleotide
  source 1..1302: mol_type = other DNA

SEQ ID NO: 4345 - DNA, 1302 bp, synthetic construct; identical to SEQ ID NO: 157
  misc_feature 1..1302: note = Description of Artificial Sequence: Synthetic polynucleotide
  source 1..1302: mol_type = other DNA

SEQ ID NO: 4346 - DNA, 1302 bp, synthetic construct; identical to SEQ ID NO: 158
  misc_feature 1..1302: note = Description of Artificial Sequence: Synthetic polynucleotide
  source 1..1302: mol_type = other DNA

SEQ ID NO: 4347 - DNA, 1302 bp, synthetic construct; identical to SEQ ID NO: 159
  misc_feature 1..1302: note = Description of Artificial Sequence: Synthetic polynucleotide
  source 1..1302: mol_type = other DNA

SEQ ID NO: 4348 - DNA, 1302 bp, synthetic construct; identical to SEQ ID NO: 160
  misc_feature 1..1302: note = Description of Artificial Sequence: Synthetic polynucleotide
  source 1..1302: mol_type = other DNA

SEQ ID NO: 4349 - DNA, 1302 bp, synthetic construct; identical to SEQ ID NO: 161
  misc_feature 1..1302: note = Description of Artificial Sequence: Synthetic polynucleotide
  source 1..1302: mol_type = other DNA

SEQ ID NO: 4350 - DNA, 1302 bp, synthetic construct; identical to SEQ ID NO: 162
  misc_feature 1..1302: note = Description of Artificial Sequence: Synthetic polynucleotide
  source 1..1302: mol_type = other DNA

SEQ ID NO: 4351 - DNA, 1305 bp, synthetic construct; identical to SEQ ID NO: 154
  misc_feature 1..1305: note = Description of Artificial Sequence: Synthetic polynucleotide
  source 1..1305: mol_type = other DNA

SEQ ID NO: 4352 - DNA, 1302 bp, synthetic construct; identical to SEQ ID NO: 164
  misc_feature 1..1302: note = Description of Artificial Sequence: Synthetic polynucleotide
  source 1..1302: mol_type = other DNA

SEQ ID NO: 4353 - DNA, 1302 bp, synthetic construct; identical to SEQ ID NO: 186
  misc_feature 1..1302: note = Description of Artificial Sequence: Synthetic Construct
  source 1..1302: mol_type = other DNA

SEQ ID NO: 4354 - DNA, 1302 bp, synthetic construct; identical to SEQ ID NO: 187
  misc_feature 1..1302: note = Description of Artificial Sequence: Synthetic Construct
  source 1..1302: mol_type = other DNA

SEQ ID NO: 4355 - DNA, 1302 bp, synthetic construct; identical to SEQ ID NO: 188
  misc_feature 1..1302: note = Description of Artificial Sequence: Synthetic Construct
  source 1..1302: mol_type = other DNA

SEQ ID NO: 4356 - DNA, 1302 bp, synthetic construct; identical to SEQ ID NO: 189
  misc_feature 1..1302: note = Description of Artificial Sequence: Synthetic Construct
  source 1..1302: mol_type = other DNA

SEQ ID NO: 4357 - DNA, 1302 bp, synthetic construct; identical to SEQ ID NO: 190
  misc_feature 1..1302: note = Description of Artificial Sequence: Synthetic Construct
  source 1..1302: mol_type = other DNA

SEQ ID NO: 4358 - DNA, 1302 bp, synthetic construct; identical to SEQ ID NO: 191
  misc_feature 1..1302: note = Description of Artificial Sequence: Synthetic Construct
  source 1..1302: mol_type = other DNA

SEQ ID NO: 4359 - DNA, 2217 bp, synthetic construct; identical to SEQ ID NO: 181
  misc_feature 1..2217: note = Description of Artificial Sequence: Synthetic polynucleotide
  source 1..2217: mol_type = other DNA

SEQ ID NO: 4360 - DNA, 2217 bp, synthetic construct; identical to SEQ ID NO: 182
  misc_feature 1..2217: note = Description of Artificial Sequence: Synthetic polynucleotide
  source 1..2217: mol_type = other DNA

SEQ ID NO: 4361 - DNA, 2217 bp, synthetic construct; identical to SEQ ID NO: 183
  misc_feature 1..2217: note = Description of Artificial Sequence: Synthetic polynucleotide
  source 1..2217: mol_type = other DNA

SEQ ID NO: 4362 - DNA, 2217 bp, synthetic construct; identical to SEQ ID NO: 184
  misc_feature 1..2217: note = Description of Artificial Sequence: Synthetic polynucleotide
  source 1..2217: mol_type = other DNA

SEQ ID NO: 4363 - protein, 427 aa, synthetic construct; identical to SEQ ID NO: 1293
  REGION 1..427: note = Description of Artificial Sequence: Synthetic polypeptide

SEQ ID NO: 4364 - DNA, 1281 bp, synthetic construct; identical to SEQ ID NO: 185
  misc_feature 1..1281: note = Description of Artificial Sequence: Synthetic polynucleotide
  source 1..1281: mol_type = other DNA

SEQ ID NO: 4365 - protein, 449 aa, synthetic construct; identical to SEQ ID NO: 199
  REGION 1..449: note = Description of Artificial Sequence: Synthetic heavy chain variable domain

SEQ ID NO: 4366 - protein, 223 aa, synthetic construct; identical to SEQ ID NO: 200
  REGION 1..223: note = Description of Artificial Sequence: Synthetic heavy chain variable domain

SEQ ID NO: 4367 - protein, 234 aa, synthetic construct; identical to SEQ ID NO: 201
  REGION 1..234: note = Description of Artificial Sequence: Synthetic heavy chain variable domain

SEQ ID NO: 4368 - protein, 460 aa, synthetic construct; identical to SEQ ID NO: 202
  REGION 1..460: note = Description of Artificial Sequence: Synthetic heavy chain variable domain

SEQ ID NO: 4369 - protein, 241 aa, synthetic construct; identical to SEQ ID NO: 203
  REGION 1..241: note = Description of Artificial Sequence: Synthetic heavy chain variable domain

SEQ ID NO: 4370 - protein, 471 aa, synthetic construct; identical to SEQ ID NO: 204
  REGION 1..471: note = Description of Artificial Sequence: Synthetic heavy chain variable domain

SEQ ID NO: 4371 - protein, 120 aa, synthetic construct; identical to SEQ ID NO: 205
  REGION 1..120: note = Description of Artificial Sequence: Synthetic heavy chain variable domain

SEQ ID NO: 4372 - protein, 111 aa, synthetic construct; identical to SEQ ID NO: 206
  REGION 1..111: note = Description of Artificial Sequence: Synthetic heavy chain variable domain

SEQ ID NO: 4373 - protein, 464 aa, synthetic construct; identical to SEQ ID NO: 207
  REGION 1..464: note = Description of Artificial Sequence: Synthetic heavy chain variable domain

SEQ ID NO: 4374 - protein, 137 aa, synthetic construct; identical to SEQ ID NO: 208
  REGION 1..137: note = Description of Artificial Sequence: Synthetic heavy chain variable domain

SEQ ID NO: 4375 - protein, 124 aa, synthetic construct; identical to SEQ ID NO: 209
  REGION 1..124: note = Description of Artificial Sequence: Synthetic heavy chain variable domain

SEQ ID NO: 4376 - protein, 130 aa, synthetic construct; identical to SEQ ID NO: 210
  REGION 1..130: note = Description of Artificial Sequence: Synthetic heavy chain variable domain

SEQ ID NO: 4377 - protein, 125 aa, synthetic construct; identical to SEQ ID NO: 211
  REGION 1..125: note = Description of Artificial Sequence: Synthetic heavy chain variable domain

SEQ ID NO: 4378 - protein, 125 aa, synthetic construct; identical to SEQ ID NO: 212
  REGION 1..125: note = Description of Artificial Sequence: Synthetic heavy chain variable domain

SEQ ID NO: 4379 - protein, 228 aa, synthetic construct; identical to SEQ ID NO: 213
  REGION 1..228: note = Description of Artificial Sequence: Synthetic heavy chain variable domain

SEQ ID NO: 4380 - protein, 98 aa, synthetic construct; identical to SEQ ID NO: 214
  REGION 1..98: note = Description of Artificial Sequence: Synthetic heavy chain variable domain
  MOD_RES 64..65: note = Any amino acid
  MOD_RES 68..69: note = Any amino acid
  MOD_RES 93: note = Any amino acid
  MOD_RES 98: note = Any amino acid

SEQ ID NO: 4381 - protein, 125 aa, synthetic construct; identical to SEQ ID NO: 215
  REGION 1..125: note = Description of Artificial Sequence: Synthetic heavy chain variable domain
  MOD_RES 76: note = Any amino acid

SEQ ID NO: 4382 - protein, 125 aa, synthetic construct; identical to SEQ ID NO: 216
  REGION 1..125: note = Description of Artificial Sequence: Synthetic heavy chain variable domain

SEQ ID NO: 4383 - protein, 125 aa, synthetic construct; identical to SEQ ID NO: 217
  REGION 1..125: note = Description of Artificial Sequence: Synthetic heavy chain variable domain

SEQ ID NO: 4384 - protein, 125 aa, synthetic construct; identical to SEQ ID NO: 218
  REGION 1..125: note = Description of Artificial Sequence: Synthetic heavy chain variable domain

SEQ ID NO: 4385 - protein, 125 aa, synthetic construct; identical to SEQ ID NO: 219
  REGION 1..125: note = Description of Artificial Sequence: Synthetic heavy chain variable domain

SEQ ID NO: 4386 - protein, 125 aa, synthetic construct; identical to SEQ ID NO: 220
  REGION 1..125: note = Description of Artificial Sequence: Synthetic heavy chain variable domain

SEQ ID NO: 4387 - protein, 125 aa, synthetic construct; identical to SEQ ID NO: 221
  REGION 1..125: note = Description of Artificial Sequence: Synthetic heavy chain variable domain

SEQ ID NO: 4388 - protein, 464 aa, synthetic construct; identical to SEQ ID NO: 207
  REGION 1..464: note = Description of Artificial Sequence: Synthetic heavy chain variable domain

SEQ ID NO: 4389 - protein, 120 aa, synthetic construct; identical to SEQ ID NO: 205
  REGION 1..120: note = Description of Artificial Sequence: Synthetic heavy chain variable domain

SEQ ID NO: 4390 - protein, 218 aa, synthetic construct; identical to SEQ ID NO: 224
  REGION 1..218: note = Description of Artificial Sequence: Synthetic heavy chain variable domain

SEQ ID NO: 4391 - protein, 219 aa, synthetic construct; identical to SEQ ID NO: 225
  REGION 1..219: note = Description of Artificial Sequence: Synthetic heavy chain variable domain

SEQ ID NO: 4392 - protein, 460 aa, synthetic construct; identical to SEQ ID NO: 202
  REGION 1..460: note = Description of Artificial Sequence: Synthetic heavy chain variable domain

SEQ ID NO: 4393 - protein, 242 aa, synthetic construct; identical to SEQ ID NO: 227
  REGION 1..242: note = Description of Artificial Sequence: Synthetic heavy chain variable domain

SEQ ID NO: 4394 - protein, 471 aa, synthetic construct; identical to SEQ ID NO: 204
  REGION 1..471: note = Description of Artificial Sequence: Synthetic heavy chain variable domain

SEQ ID NO: 4395 - protein, 118 aa, synthetic construct; identical to SEQ ID NO: 229
  REGION 1..118: note = Description of Artificial Sequence: Synthetic heavy chain variable domain

SEQ ID NO: 4396 - protein, 119 aa, synthetic construct; identical to SEQ ID NO: 230
  REGION 1..119: note = Description of Artificial Sequence: Synthetic heavy chain variable domain

SEQ ID NO: 4397 - protein, 112 aa, synthetic construct; identical to SEQ ID NO: 231
  REGION 1..112: note = Description of Artificial Sequence: Synthetic light chain variable domain

SEQ ID NO: 4398 - protein, 447 aa, synthetic construct; identical to SEQ ID NO: 232
  REGION 1..447: note = Description of Artificial Sequence: Synthetic light chain variable domain

SEQ ID NO: 4399 - protein, 111 aa, synthetic construct; identical to SEQ ID NO: 233
  REGION 1..111: note = Description of Artificial Sequence: Synthetic light chain variable domain

SEQ ID NO: 4400 - protein, 107 aa, synthetic construct; identical to SEQ ID NO: 234
  REGION 1..107: note = Description of Artificial Sequence: Synthetic light chain variable domain

SEQ ID NO: 4401 - protein, 214 aa, synthetic construct; identical to SEQ ID NO: 235
  REGION 1..214: note = Description of Artificial Sequence: Synthetic light chain variable domain

SEQ ID NO: 4402 - protein, 237 aa, synthetic construct; identical to SEQ ID NO: 236
  REGION 1..237: note = Description of Artificial Sequence: Synthetic light chain variable domain

SEQ ID NO: 4403 - protein, 107 aa, synthetic construct; identical to SEQ ID NO: 237
  REGION 1..107: note = Description of Artificial Sequence: Synthetic light chain variable domain

SEQ ID NO: 4404 - protein, 107 aa, synthetic construct; identical to SEQ ID NO: 237
  REGION 1..107: note = Description of Artificial Sequence: Synthetic light chain variable domain

SEQ ID NO: 4405 - protein, 115 aa, synthetic construct; identical to SEQ ID NO: 239
  REGION 1..115: note = Description of Artificial Sequence: Synthetic light chain variable domain

SEQ ID NO: 4406 - protein, 107 aa, synthetic construct; identical to SEQ ID NO: 237
  REGION 1..107: note = Description of Artificial Sequence: Synthetic light chain variable domain

SEQ ID NO: 4407 - protein, 112 aa, synthetic construct; identical to SEQ ID NO: 241
  REGION 1..112: note = Description of Artificial Sequence: Synthetic light chain variable domain

SEQ ID NO: 4408 - protein, 106 aa, synthetic construct; identical to SEQ ID NO: 242
  REGION 1..106: note = Description of Artificial Sequence: Synthetic light chain variable domain

SEQ ID NO: 4409 - protein, 106 aa, synthetic construct; identical to SEQ ID NO: 243
  REGION 1..106: note = Description of Artificial Sequence: Synthetic light chain variable domain

SEQ ID NO: 4410 - protein, 110 aa, synthetic construct; identical to SEQ ID NO: 244
  REGION 1..110: note = Description of Artificial Sequence: Synthetic light chain variable domain

SEQ ID NO: 4411 - protein, 109 aa, synthetic construct; identical to SEQ ID NO: 245
  REGION 1..109: note = Description of Artificial Sequence: Synthetic light chain variable domain

SEQ ID NO: 4412 - protein, 108 aa, synthetic construct; identical to SEQ ID NO: 246
  REGION 1..108: note = Description of Artificial Sequence: Synthetic light chain variable domain

SEQ ID NO: 4413 - protein, 107 aa, synthetic construct; identical to SEQ ID NO: 247
  REGION 1..107: note = Description of Artificial Sequence: Synthetic light chain variable domain

SEQ ID NO: 4414 - protein, 109 aa, synthetic construct; identical to SEQ ID NO: 248
  REGION 1..109: note = Description of Artificial Sequence: Synthetic light chain variable domain

SEQ ID NO: 4415 - protein, 109 aa, synthetic construct; identical to SEQ ID NO: 249
  REGION 1..109: note = Description of Artificial Sequence: Synthetic light chain variable domain

SEQ ID NO: 4416 - protein, 111 aa, synthetic construct; identical to SEQ ID NO: 250
  REGION 1..111: note = Description of Artificial Sequence: Synthetic light chain variable domain

SEQ ID NO: 4417 - protein, 109 aa, synthetic construct; identical to SEQ ID NO: 251
  REGION 1..109: note = Description of Artificial Sequence: Synthetic light chain variable domain
  MOD_RES 5..6: note = Any amino acid
  MOD_RES 8..9: note = Any amino acid
  MOD_RES 93: note = Any amino acid
  MOD_RES 104: note = Any amino acid

SEQ ID NO: 4418 - protein, 112 aa, synthetic construct; identical to SEQ ID NO: 252
  REGION 1..112: note = Description of Artificial Sequence: Synthetic light chain variable domain
  MOD_RES 61: note = Any amino acid

SEQ ID NO: 4419 - protein, 112 aa, synthetic construct; identical to SEQ ID NO: 253
  REGION 1..112: note = Description of Artificial Sequence: Synthetic light chain variable domain

SEQ ID NO: 4420 - protein, 110 aa, synthetic construct; identical to SEQ ID NO: 254
  REGION 1..110: note = Description of Artificial Sequence: Synthetic light chain variable domain

SEQ ID NO: 4421 - protein, 112 aa, synthetic construct; identical to SEQ ID NO: 255
  REGION 1..112: note = Description of Artificial Sequence: Synthetic light chain variable domain

SEQ ID NO: 4422 - protein, 111 aa, synthetic construct; identical to SEQ ID NO: 256
  REGION 1..111: note = Description of Artificial Sequence: Synthetic light chain variable domain

SEQ ID NO: 4423 - protein, 111 aa, synthetic construct; identical to SEQ ID NO: 257
  REGION 1..111: note = Description of Artificial Sequence: Synthetic light chain variable domain

SEQ ID NO: 4424 - protein, 106 aa, synthetic construct; identical to SEQ ID NO: 258
  REGION 1..106: note = Description of Artificial Sequence: Synthetic light chain variable domain

SEQ ID NO: 4425 - protein, 99 aa, synthetic construct; identical to SEQ ID NO: 259
  REGION 1..99: note = Description of Artificial Sequence: Synthetic light chain variable domain

SEQ ID NO: 4426 - protein, 110 aa, synthetic construct; identical to SEQ ID NO: 260
  REGION 1..110: note = Description of Artificial Sequence: Synthetic light chain variable domain

SEQ ID NO: 4427 - protein, 111 aa, synthetic construct; identical to SEQ ID NO: 261
  REGION 1..111: note = Description of Artificial Sequence: Synthetic light chain variable domain

SEQ ID NO: 4428 - protein, 124 aa, synthetic construct; identical to SEQ ID NO: 262
  REGION 1..124: note = Description of Artificial Sequence: Synthetic light chain variable domain

SEQ ID NO: 4429 - protein, 239 aa, synthetic construct; identical to SEQ ID NO: 263
  REGION 1..239: note = Description of Artificial Sequence: Synthetic light chain variable domain

SEQ ID NO: 4430 - protein, 111 aa, synthetic construct; identical to SEQ ID NO: 264
  REGION 1..111: note = Description of Artificial Sequence: Synthetic light chain variable domain

SEQ ID NO: 4431 - protein, 110 aa, synthetic construct; identical to SEQ ID NO: 265
  REGION 1..110: note = Description of Artificial Sequence: Synthetic light chain variable domain

SEQ ID NO: 4432 - protein, 111 aa, synthetic construct; identical to SEQ ID NO: 266
  REGION 1..111: note = Description of Artificial Sequence: Synthetic light chain variable domain

SEQ ID NO: 4433 - protein, 109 aa, synthetic construct; identical to SEQ ID NO: 267
  REGION 1..109: note = Description of Artificial Sequence: Synthetic light chain variable domain

SEQ ID NO: 4434 - protein, 108 aa, synthetic construct; identical to SEQ ID NO: 268
  REGION 1..108: note = Description of Artificial Sequence: Synthetic light chain variable domain

SEQ ID NO: 4435 - protein, 107 aa, synthetic construct; identical to SEQ ID NO: 269
  REGION 1..107: note = Description of Artificial Sequence: Synthetic light chain variable domain

SEQ ID NO: 4436 - protein, 109 aa, synthetic construct; identical to SEQ ID NO: 270
  REGION 1..109: note = Description of Artificial Sequence: Synthetic light chain variable domain

SEQ ID NO: 4437 - protein, 111 aa, synthetic construct; identical to SEQ ID NO: 271
  REGION 1..111: note = Description of Artificial Sequence: Synthetic light chain variable domain

SEQ ID NO: 4438 - protein, 121 aa, synthetic construct; identical to SEQ ID NO: 272
  REGION 1..121: note = Description of Artificial Sequence: Synthetic light chain variable domain

SEQ ID NO: 4439 - protein, 119 aa, synthetic construct; identical to SEQ ID NO: 749
  REGION 1..119: note = Description of Artificial Sequence: Synthetic Antibody variable domain

SEQ ID NO: 4440 - protein, 118 aa, synthetic construct; identical to SEQ ID NO: 750
  REGION 1..118: note = Description of Artificial Sequence: Synthetic Antibody variable domain

SEQ ID NO: 4441 - protein, 118 aa, synthetic construct; identical to SEQ ID NO: 750
  REGION 1..118: note = Description of Artificial Sequence: Synthetic Antibody variable domain

SEQ ID NO: 4442 - protein, 120 aa, synthetic construct; identical to SEQ ID NO: 752
  REGION 1..120: note = Description of Artificial Sequence: Synthetic Antibody variable domain

SEQ ID NO: 4443 - protein, 119 aa, synthetic construct; identical to SEQ ID NO: 753
  REGION 1..119: note = Description of Artificial Sequence: Synthetic Antibody variable domain

SEQ ID NO: 4444 - protein, 119 aa, synthetic construct; identical to SEQ ID NO: 754
  REGION 1..119: note = Description of Artificial Sequence: Synthetic Antibody variable domain

SEQ ID NO: 4445 - protein, 117 aa, synthetic construct; identical to SEQ ID NO: 755
  REGION 1..117: note = Description of Artificial Sequence: Synthetic Antibody variable domain

SEQ ID NO: 4446 - protein, 119 aa, synthetic construct; identical to SEQ ID NO: 756
  REGION 1..119: note = Description of Artificial Sequence: Synthetic Antibody variable domain

SEQ ID NO: 4447 - protein, 112 aa, synthetic construct; identical to SEQ ID NO: 757
  REGION 1..112: note = Description of Artificial Sequence: Synthetic Antibody variable domain

SEQ ID NO: 4448 - protein, 111 aa, synthetic construct; identical to SEQ ID NO: 758
  REGION 1..111: note = Description of Artificial Sequence: Synthetic Antibody variable domain

SEQ ID NO: 4449 - protein, 112 aa, synthetic construct; identical to SEQ ID NO: 759
  REGION 1..112: note = Description of Artificial Sequence: Synthetic Antibody variable domain

SEQ ID NO: 4450 - protein, 107 aa, synthetic construct; identical to SEQ ID NO: 760
  REGION 1..107: note = Description of Artificial Sequence: Synthetic Antibody variable domain

SEQ ID NO: 4451 - protein, 112 aa, synthetic construct; identical to SEQ ID NO: 761
  REGION 1..112: note = Description of Artificial Sequence: Synthetic Antibody variable domain

SEQ ID NO: 4452 - protein, 111 aa, synthetic construct; identical to SEQ ID NO: 762
  REGION 1..111: note = Description of Artificial Sequence: Synthetic Antibody variable domain

SEQ ID NO: 4453 - protein, 112 aa, synthetic construct; identical to SEQ ID NO: 763
  REGION 1..112: note = Description of Artificial Sequence: Synthetic Antibody variable domain

SEQ ID NO: 4454 - protein, 107 aa, synthetic construct; identical to SEQ ID NO: 764
  REGION 1..107: note = Description of Artificial Sequence: Synthetic Antibody variable domain

SEQ ID NO: 4455 - protein, 107 aa, synthetic construct; identical to SEQ ID NO: 773
  REGION 1..107: note = Description of Artificial Sequence: Synthetic Antibody variable domain

SEQ ID NO: 4456 - protein, 108 aa, synthetic construct; identical to SEQ ID NO: 774
  REGION 1..108: note = Description of Artificial Sequence: Synthetic Antibody variable domain

SEQ ID NO: 4457 - protein, 124 aa, synthetic construct; identical to SEQ ID NO: 775
  REGION 1..124: note = Description of Artificial Sequence: Synthetic Antibody variable domain

SEQ ID NO: 4458 - protein, 122 aa, synthetic construct; identical to SEQ ID NO: 776
  REGION 1..122: note = Description of Artificial Sequence: Synthetic Antibody variable domain

SEQ ID NO: 4459 - protein, 122 aa, synthetic construct; identical to SEQ ID NO: 777
  REGION 1..122: note = Description of Artificial Sequence: Synthetic Antibody variable domain

SEQ ID NO: 4460 - protein, 120 aa, Mus musculus; identical to SEQ ID NO: 781

SEQ ID NO: 4461 - protein, 119 aa, synthetic construct; identical to SEQ ID NO: 782
  REGION 1..119: note = Description of Artificial Sequence: Synthetic Antibody variable domain

SEQ ID NO: 4462 - protein, 122 aa, synthetic construct; identical to SEQ ID NO: 783
  REGION 1..122: note = Description of Artificial Sequence: Synthetic Antibody variable domain

SEQ ID NO: 4463 - protein, 117 aa, synthetic construct; identical to SEQ ID NO: 784
  REGION 1..117: note = Description of Artificial Sequence: Synthetic Antibody variable domain

SEQ ID NO: 4464 - protein, 107 aa, Mus musculus; identical to SEQ ID NO: 785

SEQ ID NO: 4465 - protein, 109 aa, synthetic construct; identical to SEQ ID NO: 786
  REGION 1..109: note = Description of Artificial Sequence: Synthetic Antibody variable domain

SEQ ID NO: 4466 - protein, 110 aa, synthetic construct; identical to SEQ ID NO: 787
  REGION 1..110: note = Description of Artificial Sequence: Synthetic Antibody variable domain

SEQ ID NO: 4467 - protein, 109 aa, synthetic construct; identical to SEQ ID NO: 788
  REGION 1..109: note = Description of Artificial Sequence: Synthetic Antibody variable domain

SEQ ID NO: 4468 - protein, 449 aa, synthetic construct; identical to SEQ ID NO: 793
  REGION 1..449: note = Description of Artificial Sequence: Synthetic Antibody variable domain

SEQ ID NO: 4469 - protein, 211 aa, synthetic construct; identical to SEQ ID NO: 794
  REGION 1..211: note = Description of Artificial Sequence: Synthetic Antibody variable domain

SEQ ID NO: 4470 - protein, 446 aa, synthetic construct; identical to SEQ ID NO: 795
  REGION 1..446: note = Description of Artificial Sequence: Synthetic Antibody variable domain

SEQ ID NO: 4471 - protein, 448 aa, synthetic construct; identical to SEQ ID NO: 796
  REGION 1..448: note = Description of Artificial Sequence: Synthetic Antibody variable domain

SEQ ID NO: 4472 - protein, 211 aa, synthetic construct; identical to SEQ ID NO: 797
  REGION 1..211: note = Description of Artificial Sequence: Synthetic Antibody variable domain

SEQ ID NO: 4473 - protein, 448 aa, synthetic construct; identical to SEQ ID NO: 798
  REGION 1..448: note = Description of Artificial Sequence: Synthetic Antibody variable domain

SEQ ID NO: 4474 - protein, 211 aa, synthetic construct; identical to SEQ ID NO: 799
  REGION 1..211: note = Description of Artificial Sequence: Synthetic Antibody variable domain

SEQ ID NO: 4475 - protein, 446 aa, synthetic construct; identical to SEQ ID NO: 800
  REGION 1..446: note = Description of Artificial Sequence: Synthetic Antibody variable domain

SEQ ID NO: 4476 - protein, 105 aa, Homo sapiens; identical to SEQ ID NO: 801

SEQ ID NO: 4477 - protein, 102 aa, Homo sapiens; identical to SEQ ID NO: 802

SEQ ID NO: 4478 - protein, 449 aa, synthetic construct; identical to SEQ ID NO: 793
  REGION 1..449: note = Description of Artificial Sequence: Synthetic Antibody variable domain

SEQ ID NO: 4479 - protein, 211 aa, synthetic construct; identical to SEQ ID NO: 794
  REGION 1..211: note = Description of Artificial Sequence: Synthetic Antibody variable domain

SEQ ID NO: 4480 - protein, 449 aa, synthetic construct; identical to SEQ ID NO: 805
  REGION 1..449: note = Description of Artificial Sequence: Synthetic Antibody variable domain

SEQ ID NO: 4481 - protein, 211 aa, synthetic construct; identical to SEQ ID NO: 806
  REGION 1..211: note = Description of Artificial Sequence: Synthetic Antibody variable domain

SEQ ID NO: 4482 - protein, 446 aa, synthetic construct; identical to SEQ ID NO: 795
  REGION 1..446: note = Description of Artificial Sequence: Synthetic Antibody variable domain

SEQ ID NO: 4483 - protein, 446 aa, synthetic construct; identical to SEQ ID NO: 800
  REGION 1..446: note = Description of Artificial Sequence: Synthetic Antibody variable domain

SEQ ID NO: 4484 - protein, 119 aa, synthetic construct; identical to SEQ ID NO: 809
  REGION 1..119: note = Description of Artificial Sequence: Synthetic Antibody variable domain

SEQ ID NO: 4485 - protein, 104 aa, synthetic construct; identical to SEQ ID NO: 810
  REGION 1..104: note = Description of Artificial Sequence: Synthetic Antibody variable domain

SEQ ID NO: 4486 - protein, 118 aa, synthetic construct; identical to SEQ ID NO: 811
  REGION 1..118: note = Description of Artificial Sequence: Synthetic Antibody variable domain

SEQ ID NO: 4487 - protein, 118 aa, synthetic construct; identical to SEQ ID NO: 812
  REGION 1..118: note = Description of Artificial Sequence: Synthetic Antibody variable domain

SEQ ID NO: 4488 - protein, 108 aa, synthetic construct; identical to SEQ ID NO: 813
  REGION 1..108: note = Description of Artificial Sequence: Synthetic Antibody variable domain

SEQ ID NO: 4489 - protein, 108 aa, synthetic construct; identical to SEQ ID NO: 814
  REGION 1..108: note = Description of Artificial Sequence: Synthetic Antibody variable domain

SEQ ID NO: 4490 - protein, 113 aa, synthetic construct; identical to SEQ ID NO: 815
  REGION 1..113: note = Description of Artificial Sequence: Synthetic Antibody variable domain

SEQ ID NO: 4491 - protein, 113 aa, synthetic construct; identical to SEQ ID NO: 816
  REGION 1..113: note = Description of Artificial Sequence: Synthetic Antibody variable domain

SEQ ID NO: 4492 - protein, 118 aa, synthetic construct; identical to SEQ ID NO: 811
  REGION 1..118: note = Description of Artificial Sequence: Synthetic Antibody variable domain

SEQ ID NO: 4493 - protein, 118 aa, synthetic construct; identical to SEQ ID NO: 812
  REGION 1..118: note = Description of Artificial Sequence: Synthetic Antibody variable domain

SEQ ID NO: 4494 - protein, 108 aa, synthetic construct; identical to SEQ ID NO: 813
  REGION 1..108: note = Description of Artificial Sequence: Synthetic Antibody variable domain

SEQ ID NO: 4495 - protein, 108 aa, synthetic construct; identical to SEQ ID NO: 814
  REGION 1..108: note = Description of Artificial Sequence: Synthetic Antibody variable domain

SEQ ID NO: 4496 - protein, 240 aa, synthetic construct; identical to SEQ ID NO: 821
  REGION 1..240: note = Description of Artificial Sequence: Synthetic Antibody variable domain

SEQ ID NO: 4497 - protein, 462 aa, synthetic construct; identical to SEQ ID NO: 822
  REGION 1..462: note = Description of Artificial Sequence: Synthetic Antibody variable domain

SEQ ID NO: 4498 - protein, 120 aa, synthetic construct; identical to SEQ ID NO: 823
  REGION 1..120: note = Description of Artificial Sequence: Synthetic Antibody variable domain

SEQ ID NO: 4499 - protein, 112 aa, synthetic construct; identical to SEQ ID NO: 824
  REGION 1..112: note = Description of Artificial Sequence: Synthetic Antibody variable domain

SEQ ID NO: 4500 - protein, 120 aa, synthetic construct; identical to SEQ ID NO: 825
  REGION 1..120: note = Description of Artificial Sequence: Synthetic Antibody variable domain

SEQ ID NO: 4501 - protein, 112 aa, synthetic construct; identical to SEQ ID NO: 826
  REGION 1..112: note = Description of Artificial Sequence: Synthetic Antibody variable domain

SEQ ID NO: 4502 - protein, 119 aa, synthetic construct; identical to SEQ ID NO: 827
  REGION 1..119: note = Description of Artificial Sequence: Synthetic Antibody variable domain

SEQ ID NO: 4503 - protein, 113 aa, synthetic construct; identical to SEQ ID NO: 828
  REGION 1..113: note = Description of Artificial Sequence: Synthetic Antibody variable domain

SEQ ID NO: 4504 - protein, 119 aa, synthetic construct; identical to SEQ ID NO: 829
  REGION 1..119: note = Description of Artificial Sequence: Synthetic Antibody variable domain

SEQ ID NO: 4505 - protein, 113 aa, synthetic construct; identical to SEQ ID NO: 830
  REGION 1..113: note = Description of Artificial Sequence: Synthetic Antibody variable domain

SEQ ID NO: 4506 - protein, 119 aa, synthetic construct; identical to SEQ ID NO: 831
  REGION 1..119: note = Description of Artificial Sequence: Synthetic Antibody variable domain

SEQ ID NO: 4507 - protein, 113 aa, synthetic construct; identical to SEQ ID NO: 832
  REGION 1..113: note = Description of Artificial Sequence: Synthetic Antibody variable domain

SEQ ID NO: 4508 - protein, 119 aa, synthetic construct; identical to SEQ ID NO: 833
  REGION 1..119: note = Description of Artificial Sequence: Synthetic Antibody variable domain

SEQ ID NO: 4509 - protein, 113 aa, synthetic construct; identical to SEQ ID NO: 834
  REGION 1..113: note = Description of Artificial Sequence: Synthetic Antibody variable domain

SEQ ID NO: 4510 - protein, 120 aa, synthetic construct; identical to SEQ ID NO: 835
  REGION 1..120: note = Description of Artificial Sequence: Synthetic Antibody variable domain

SEQ ID NO: 4511 - protein, 112 aa, synthetic construct; identical to SEQ ID NO: 836
  REGION 1..112: note = Description of Artificial Sequence: Synthetic Antibody variable domain

SEQ ID NO: 4512 - protein, 120 aa, synthetic construct; identical to SEQ ID NO: 837
  REGION 1..120: note = Description of Artificial Sequence: Synthetic Antibody variable domain

SEQ ID NO: 4513 - protein, 112 aa, synthetic construct; identical to SEQ ID NO: 838
  REGION 1..112: note = Description of Artificial Sequence: Synthetic Antibody variable domain

SEQ ID NO: 4514 - protein, 121 aa, synthetic construct; identical to SEQ ID NO: 839
  REGION 1..121: note = Description of Artificial Sequence: Synthetic Antibody variable domain

SEQ ID NO: 4515 - protein, 121 aa, synthetic construct; identical to SEQ ID NO: 840
  REGION 1..121: note = Description of Artificial Sequence: Synthetic Antibody variable domain

SEQ ID NO: 4516 - protein, 107 aa, synthetic construct; identical to SEQ ID NO: 4045
  REGION 1..107: note = Description of Artificial Sequence: Synthetic Antibody variable domain

SEQ ID NO: 4517 - protein, 119 aa, synthetic construct; identical to SEQ ID NO: 842
  REGION 1..119: note = Description of Artificial Sequence: Synthetic Antibody variable domain

SEQ ID NO: 4518 - protein, 113 aa, synthetic construct; identical to SEQ ID NO: 843
  REGION 1..113: note = Description of Artificial Sequence: Synthetic Antibody variable domain

SEQ ID NO: 4519 - protein, 240 aa, synthetic construct; identical to SEQ ID NO: 821
  REGION 1..240: note = Description of Artificial Sequence: Synthetic Antibody variable domain

SEQ ID NO: 4520 - protein, 462 aa, synthetic construct; identical to SEQ ID NO: 822
  REGION 1..462: note = Description of Artificial Sequence: Synthetic Antibody variable domain

SEQ ID NO: 4521 - protein, 239 aa, synthetic construct; identical to SEQ ID NO: 846
  REGION 1..239: note = Description of Artificial Sequence: Synthetic Antibody variable domain

SEQ ID NO: 4522 - protein, 595 aa, synthetic construct; identical to SEQ ID NO: 847
  REGION 1..595: note = Description of Artificial Sequence: Synthetic Antibody variable domain

SEQ ID NO: 4523 - protein, 105 aa, Homo sapiens; identical to SEQ ID NO: 801

SEQ ID NO: 4524 - protein, 102 aa, Homo sapiens; identical to SEQ ID NO: 802

SEQ ID NO: 4525 - protein, 569 aa, Homo sapiens; identical to SEQ ID NO: 850

SEQ ID NO: 4526 - protein, 219 aa, Homo sapiens; identical to SEQ ID NO: 851

SEQ ID NO: 4527 - protein, 240 aa, synthetic construct; identical to SEQ ID NO: 821
  REGION 1..240: note = Description of Artificial Sequence: Synthetic Antibody variable domain

SEQ ID NO: 4528 - protein, 462 aa, synthetic construct; identical to SEQ ID NO: 822
  REGION 1..462: note = Description of Artificial Sequence: Synthetic Antibody variable domain

SEQ ID NO: 4529 - protein, 113 aa, synthetic construct; identical to SEQ ID NO: 816
  REGION 1..113: note = Description of Artificial Sequence: Synthetic Antibody variable domain

SEQ ID NO: 4530 - protein, 113 aa, synthetic construct; identical to SEQ ID NO: 815
  REGION 1..113: note = Description of Artificial Sequence: Synthetic Antibody variable domain

SEQ ID NO: 4531 - protein, 240 aa, synthetic construct; identical to SEQ ID NO: 821
  REGION 1..240: note = Description of Artificial Sequence: Synthetic Antibody variable domain

SEQ ID NO: 4532 - protein, 462 aa, synthetic construct; identical to SEQ ID NO: 822
  REGION 1..462: note = Description of Artificial Sequence: Synthetic Antibody variable domain

SEQ ID NO: 4533 - protein, 137 aa, Mus musculus; identical to SEQ ID NO: 858

SEQ ID NO: 4534 - protein, 133 aa, Mus musculus; identical to SEQ ID NO: 859

SEQ ID NO: 4535 - protein, 112 aa, synthetic construct; identical to SEQ ID NO: 860
  REGION 1..112: note = Description of Artificial Sequence: Synthetic Antibody variable domain

SEQ ID NO: 4536 - protein, 119 aa, synthetic construct; identical to SEQ ID NO: 861
  REGION 1..119: note = Description of Artificial Sequence: Synthetic Antibody variable domain

SEQ ID NO: 4537 - protein, 112 aa, Mus musculus; identical to SEQ ID NO: 860

SEQ ID NO: 4538 - protein, 119 aa, Mus musculus; identical to SEQ ID NO: 861

SEQ ID NO: 4539 - protein, 112 aa, Mus musculus; identical to SEQ ID NO: 864

SEQ ID NO: 4540 - protein, 119 aa, Mus musculus; identical to SEQ ID NO: 861

SEQ ID NO: 4541 - protein, 112 aa, synthetic construct; identical to SEQ ID NO: 860
  REGION 1..112: note = Description of Artificial Sequence: Synthetic Antibody variable domain

SEQ ID NO: 4542 - protein, 119 aa, synthetic construct; identical to SEQ ID NO: 861
  REGION 1..119: note = Description of Artificial Sequence: Synthetic Antibody variable domain

SEQ ID NO: 4543 - protein, 115 aa, synthetic construct; identical to SEQ ID NO: 868
  REGION 1..115: note = Description of Artificial Sequence: Synthetic Antibody variable domain

SEQ ID NO: 4544 - protein, 108 aa, synthetic construct; identical to SEQ ID NO: 869
  REGION 1..108: note = Description of Artificial Sequence: Synthetic Antibody variable domain

SEQ ID NO: 4545 - protein, 115 aa, synthetic construct; identical to SEQ ID NO: 870
  REGION 1..115: note = Description of Artificial Sequence: Synthetic Antibody variable domain

SEQ ID NO: 4546 - protein, 111 aa, synthetic construct; identical to SEQ ID NO: 871
  REGION 1..111: note = Description of Artificial Sequence: Synthetic Antibody variable domain

SEQ ID NO: 4547 - protein, 115 aa, synthetic construct; identical to SEQ ID NO: 901
  REGION 1..115: note = Description of Artificial Sequence: Synthetic Antibody variable domain

SEQ ID NO: 4548 - protein, 111 aa, synthetic construct; identical to SEQ ID NO: 902
  REGION 1..111: note = Description of Artificial Sequence: Synthetic Antibody variable domain

SEQ ID NO: 4549 - protein, 117 aa, synthetic construct; identical to SEQ ID NO: 903
  REGION 1..117: note = Description of Artificial Sequence: Synthetic Antibody variable domain

SEQ ID NO: 4550 - protein, 228 aa, synthetic construct; identical to SEQ ID NO: 904
  REGION 1..228: note = Description of Artificial Sequence: Synthetic Antibody variable domain

SEQ ID NO: 4551 - protein, 120 aa, synthetic construct; identical to SEQ ID NO: 905
  REGION 1..120: note = Description of Artificial Sequence: Synthetic Antibody variable domain

SEQ ID NO: 4552 - protein, 115 aa, synthetic construct; identical to SEQ ID NO: 906
  REGION 1..115: note = Description of Artificial Sequence: Synthetic Antibody variable domain

SEQ ID NO: 4553 - protein, 118 aa, synthetic construct; identical to SEQ ID NO: 907
  REGION 1..118: note = Description of Artificial Sequence: Synthetic Antibody variable domain

SEQ ID NO: 4554 - protein, 113 aa, synthetic construct; identical to SEQ ID NO: 908
  REGION 1..113: note = Description of Artificial Sequence: Synthetic Antibody variable domain

SEQ ID NO: 4555 - protein, 119 aa, synthetic construct; identical to SEQ ID NO: 909
  REGION 1..119: note = Description of Artificial Sequence: Synthetic Antibody variable domain

SEQ ID NO: 4556 - protein, 112 aa, synthetic construct; identical to SEQ ID NO: 910
  REGION 1..112: note = Description of Artificial Sequence: Synthetic Antibody variable domain

SEQ ID NO: 4557 - protein, 119 aa, synthetic construct; identical to SEQ ID NO: 911
  REGION 1..119: note = Description of Artificial Sequence: Synthetic Antibody variable domain

SEQ ID NO: 4558 - protein, 112 aa, synthetic construct; identical to SEQ ID NO: 912
  REGION 1..112: note = Description of Artificial Sequence: Synthetic Antibody variable domain

SEQ ID NO: 4559 - protein, 117 aa, synthetic construct; identical to SEQ ID NO: 913
  REGION 1..117: note = Description of Artificial Sequence: Synthetic Antibody variable domain

SEQ ID NO: 4560 - protein, 111 aa, synthetic construct; identical to SEQ ID NO: 914
  REGION 1..111: note = Description of Artificial Sequence: Synthetic Antibody variable domain

SEQ ID NO: 4561 - protein, 117 aa, synthetic construct; identical to SEQ ID NO: 915
  REGION 1..117: note = Description of Artificial Sequence: Synthetic Antibody variable domain

SEQ ID NO: 4562 - protein, 111 aa, synthetic construct; identical to SEQ ID NO: 916
  REGION 1..111: note = Description of Artificial Sequence: Synthetic Antibody variable domain

SEQ ID NO: 4563 - protein, 120 aa, synthetic construct [sequence omitted]

SEQ ID NO: 4564 - protein, 107 aa, synthetic construct [sequence omitted]

SEQ ID NO: 4565 - protein, 109 aa, synthetic construct; identical to SEQ ID NO: 919
  REGION 1..109: note = Description of Artificial Sequence: Synthetic Antibody variable domain

SEQ ID NO: 4566 - protein, 120 aa, synthetic construct; identical to SEQ ID NO: 920
  REGION 1..120: note = Description of Artificial Sequence: Synthetic Antibody variable domain

SEQ ID NO: 4567 - protein, 109 aa, synthetic construct; identical to SEQ ID NO: 921
  REGION 1..109: note = Description of Artificial Sequence: Synthetic Antibody variable domain

SEQ ID NO: 4568 - protein, 120 aa, synthetic construct; identical to SEQ ID NO: 922
  REGION 1..120: note = Description of Artificial Sequence: Synthetic Antibody variable domain

SEQ ID NO: 4569 - protein, 109 aa, synthetic construct; identical to SEQ ID NO: 923
  REGION 1..109: note = Description of Artificial Sequence: Synthetic Antibody variable domain

SEQ ID NO: 4570 - protein, 120 aa, synthetic construct; identical to SEQ ID NO: 924
  REGION 1..120: note = Description of Artificial Sequence: Synthetic Antibody variable domain

SEQ ID NO: 4571 - protein, 20 aa, synthetic construct
  REGION 1..20: note = Description of Artificial Sequence: Synthetic Antibody variable domain
EVQLVESGGGLVQPKGSLKL

SEQ ID NO: 4572 - protein, 20 aa, synthetic construct
  REGION 1..20: note = Description of Artificial Sequence: Synthetic Antibody variable domain
DIVMTQSQKFMSTSVVDRIS

SEQ ID NO: 4573 - protein, 107 aa, Mus musculus; identical to SEQ ID NO: 927

SEQ ID NO: 4574 - protein, 119 aa, Mus musculus; identical to SEQ ID NO: 928

SEQ ID NO: 4575 - protein, 107 aa, synthetic construct [sequence omitted]

SEQ ID NO: 4576 - protein, 119 aa, synthetic construct [sequence omitted]

SEQ ID NO: 4577 - protein, 107 aa, synthetic construct; identical to SEQ ID NO: 931
  REGION 1..107: note = Description of Artificial Sequence: Synthetic Antibody variable domain

SEQ ID NO: 4578 - protein, 119 aa, synthetic construct; identical to SEQ ID NO: 932
  REGION 1..119: note = Description of Artificial Sequence: Synthetic Antibody variable domain

SEQ ID NO: 4579 - protein, 214 aa, synthetic construct; identical to SEQ ID NO: 933
  REGION 1..214: note = Description of Artificial Sequence: Synthetic Antibody variable domain

SEQ ID NO: 4580 - protein, 448 aa, synthetic construct; identical to SEQ ID NO: 934
  REGION 1..448: note = Description of Artificial Sequence: Synthetic Antibody variable domain

SEQ ID NO: 4581 - protein, 214 aa, synthetic construct; identical to SEQ ID NO: 935
  REGION 1..214: note = Description of Artificial Sequence: Synthetic Antibody variable domain

SEQ ID NO: 4582 - protein, 449 aa, synthetic construct; identical to SEQ ID NO: 936
  REGION 1..449: note = Description of Artificial Sequence: Synthetic Antibody variable domain

SEQ ID NO: 4583 - protein, 217 aa, synthetic construct; identical to SEQ ID NO: 937
  REGION 1..217: note = Description of Artificial Sequence: Synthetic Antibody variable domain

SEQ ID NO: 4584 - protein, 449 aa, synthetic construct; identical to SEQ ID NO: 938
  REGION 1..449: note = Description of Artificial Sequence: Synthetic Antibody variable domain

SEQ ID NO: 4585 - protein, 124 aa, Homo sapiens; identical to SEQ ID NO: 939

SEQ ID NO: 4586 - protein, 107 aa, Homo sapiens; identical to SEQ ID NO: 940

SEQ ID NO: 4587 - protein, 122 aa, Homo sapiens; identical to SEQ ID NO: 941

SEQ ID NO: 4588 - protein, 107 aa, Homo sapiens; identical to SEQ ID NO: 942

SEQ ID NO: 4589 - protein, 122 aa, Homo sapiens; identical to SEQ ID NO: 943

SEQ ID NO: 4590 - protein, 108 aa, Homo sapiens; identical to SEQ ID NO: 944

SEQ ID NO: 4591 - protein, 109 aa, synthetic construct; identical to SEQ ID NO: 945
  REGION 1..109: note = Description of Artificial Sequence: Synthetic Antibody variable domain

SEQ ID NO: 4592 - protein, 109 aa, synthetic construct; identical to SEQ ID NO: 946
  REGION 1..109: note = Description of Artificial Sequence: Synthetic Antibody variable domain

SEQ ID NO: 4593 - protein, 109 aa, synthetic construct; identical to SEQ ID NO: 947
  REGION 1..109: note = Description of Artificial Sequence: Synthetic Antibody variable domain

SEQ ID NO: 4594 - protein, 228 aa, synthetic construct; identical to SEQ ID NO: 948
  REGION 1..228: note = Description of Artificial Sequence: Synthetic Antibody variable domain

SEQ ID NO: 4595 - protein, 109 aa, Homo sapiens; identical to SEQ ID NO: 949

SEQ ID NO: 4596 - protein, 142 aa, synthetic construct; identical to SEQ ID NO: 950
  REGION 1..142: note = Description of Artificial Sequence: Synthetic Antibody variable domain

SEQ ID NO: 4597 - protein, 130 aa, synthetic construct; identical to SEQ ID NO: 951
  REGION 1..130: note = Description of Artificial Sequence: Synthetic Antibody variable domain

SEQ ID NO: 4598 - protein, 472 aa, synthetic construct; identical to SEQ ID NO: 952
  REGION 1..472: note = Description of Artificial Sequence: Synthetic Antibody variable domain

SEQ ID NO: 4599 - protein, 236 aa, synthetic construct; identical to SEQ ID NO: 953
  REGION 1..236: note = Description of Artificial Sequence: Synthetic Antibody variable domain

SEQ ID NO: 4600 - protein, 628 aa, synthetic construct; identical to SEQ ID NO: 954
  REGION 1..628: note = Description of Artificial Sequence: Synthetic Antibody variable domain

SEQ ID NO: 4601 - protein, 643 aa, synthetic construct; identical to SEQ ID NO: 955
  REGION 1..643: note = Description of Artificial Sequence: Synthetic Antibody variable domain

SEQ ID NO: 4602 - protein, 214 aa, Mus musculus; identical to SEQ ID NO: 956

SEQ ID NO: 4603 - protein, 220 aa, Mus musculus; identical to SEQ ID NO: 957

SEQ ID NO: 4604 - protein, 233 aa, synthetic construct; identical to SEQ ID NO: 958
  REGION 1..233: note = Description of Artificial Sequence: Synthetic Antibody variable domain

SEQ ID NO: 4605 - protein, 467 aa, synthetic construct; identical to SEQ ID NO: 959
  REGION 1..467: note = Description of Artificial Sequence: Synthetic Antibody variable domain

SEQ ID NO: 4606 - protein, 219 aa, synthetic construct; identical to SEQ ID NO: 960
  REGION 1..219: note = Description of Artificial Sequence: Synthetic Antibody variable domain

SEQ ID NO: 4607 - protein, 234 aa, synthetic construct; identical to SEQ ID NO: 961
  REGION 1..234: note = Description of Artificial Sequence: Synthetic Antibody variable domain

SEQ ID NO: 4608 - protein, 450 aa, synthetic construct; identical to SEQ ID NO: 962
  REGION 1..450: note = Description of Artificial Sequence: Synthetic Antibody variable domain

SEQ ID NO: 4609 - protein, 450 aa, synthetic construct; identical to SEQ ID NO: 963
  REGION 1..450: note = Description of Artificial Sequence: Synthetic Antibody variable domain

SEQ ID NO: 4610 - protein, 214 aa, synthetic construct; identical to SEQ ID NO: 964
  REGION 1..214: note = Description of Artificial Sequence: Synthetic Antibody variable domain

SEQ ID NO: 4611 - protein, 129 aa, synthetic construct; identical to SEQ ID NO: 965
  REGION 1..129: note = Description of Artificial Sequence: Synthetic Antibody variable domain

SEQ ID NO: 4612 - protein, 111 aa, synthetic construct; identical to SEQ ID NO: 966
  REGION 1..111: note = Description of Artificial Sequence: Synthetic Antibody variable domain

SEQ ID NO: 4613 - protein, 121 aa, synthetic construct; identical to SEQ ID NO: 967
  REGION 1..121: note = Description of Artificial Sequence: Synthetic Antibody variable domain

SEQ ID NO: 4614 - protein, 107 aa, synthetic construct; identical to SEQ ID NO: 968
  REGION 1..107: note = Description of Artificial Sequence: Synthetic Antibody variable domain

SEQ ID NO: 4615 - protein, 451 aa, synthetic construct; identical to SEQ ID NO: 969
  REGION 1..451: note = Description of Artificial Sequence: Synthetic Antibody variable domain

SEQ ID NO: 4616 - protein, 469 aa, synthetic construct; identical to SEQ ID NO: 970
  REGION 1..469: note = Description of Artificial Sequence: Synthetic Antibody variable domain

SEQ ID NO: 4617 - protein, 233 aa, synthetic construct; identical to SEQ ID NO: 971
  REGION 1..233: note = Description of Artificial Sequence: Synthetic Antibody variable domain

SEQ ID NO: 4618 - protein, 450 aa, synthetic construct; identical to SEQ ID NO: 972
  REGION 1..450: note = Description of Artificial Sequence: Synthetic Antibody variable domain

SEQ ID NO: 4619 - DNA, 726 bp, synthetic construct; identical to SEQ ID NO: 1295
  misc_feature 1..726: note = Description of Artificial Sequence: Synthetic CD19 scFv
  source 1..726: mol_type = other DNA

SEQ ID NO: 4620 - DNA, 726 bp, synthetic construct; identical to SEQ ID NO: 1296
  misc_feature 1..726: note = Description of Artificial Sequence: Synthetic CD19 scFv
  source 1..726: mol_type = other DNA

SEQ ID NO: 4621 - DNA, 726 bp, synthetic construct; identical to SEQ ID NO: 1297
  misc_feature 1..726: note = Description of Artificial Sequence: Synthetic CD19 scFv
  source 1..726: mol_type = other DNA

SEQ ID NO: 4622 - DNA, 726 bp, synthetic construct; identical to SEQ ID NO: 1298
  misc_feature 1..726: note = Description of Artificial Sequence: Synthetic CD19 scFv
  source 1..726: mol_type = other DNA

SEQ ID NO: 4623 - DNA, 726 bp, synthetic construct; identical to SEQ ID NO: 1299
  misc_feature 1..726: note = Description of Artificial Sequence: Synthetic CD19 scFv
  source 1..726: mol_type = other DNA

SEQ ID NO: 4624 - DNA, 207 bp, Homo sapiens; identical to SEQ ID NO: 1301
  source 1..207: mol_type = other DNA

SEQ ID NO: 4625 - DNA, 135 bp, synthetic construct; identical to SEQ ID NO: 1303
  misc_feature 1..135: note = Description of Artificial Sequence: Synthetic Construct
  source 1..135: mol_type = other DNA

SEQ ID NO: 4626 - DNA, 135 bp, synthetic construct; identical to SEQ ID NO: 1304
  misc_feature 1..135: note = Description of Artificial Sequence: Synthetic Construct
  source 1..135: mol_type = other DNA

SEQ ID NO: 4627 - DNA, 135 bp, synthetic construct; identical to SEQ ID NO: 1305
  misc_feature 1..135: note = Description of Artificial Sequence: Synthetic Construct
  source 1..135: mol_type = other DNA

SEQ ID NO: 4628 - DNA, 135 bp, synthetic construct; identical to SEQ ID NO: 1306
  misc_feature 1..135: note = Description of Artificial Sequence: Synthetic Construct
  source 1..135: mol_type = other DNA

SEQ ID NO: 4629 - DNA, 135 bp, synthetic construct; identical to SEQ ID NO: 1307
  misc_feature 1..135: note = Description of Artificial Sequence: Synthetic Construct
  source 1..135: mol_type = other DNA

SEQ ID NO: 4630 - DNA, 338 bp, synthetic construct; identical to SEQ ID NO: 1309
  misc_feature 1..338: note = Description of Artificial Sequence: Synthetic Construct
  source 1..338: mol_type = other DNA

SEQ ID NO: 4631 - DNA, 338 bp, synthetic construct; identical to SEQ ID NO: 1310
  misc_feature 1..338: note = Description of Artificial Sequence: Synthetic Construct
  source 1..338: mol_type = other DNA

SEQ ID NO: 4632 - DNA, 338 bp, synthetic construct; identical to SEQ ID NO: 1311
  misc_feature 1..338: note = Description of Artificial Sequence: Synthetic Construct
  source 1..338: mol_type = other DNA

SEQ ID NO: 4633 - DNA, 338 bp, synthetic construct; identical to SEQ ID NO: 1312
  misc_feature 1..338: note = Description of Artificial Sequence: Synthetic Construct
  source 1..338: mol_type = other DNA

SEQ ID NO: 4634 - DNA, 338 bp, synthetic construct; identical to SEQ ID NO: 1313
  misc_feature 1..338: note = Description of Artificial Sequence: Synthetic Construct
  source 1..338: mol_type = other DNA

SEQ ID NO: 4635 - DNA, 126 bp, synthetic construct; identical to SEQ ID NO: 1315
  misc_feature 1..126: note = Description of Artificial Sequence: Synthetic Construct
  source 1..126: mol_type = other DNA

SEQ ID NO: 4636 - DNA, 126 bp, synthetic construct; identical to SEQ ID NO: 1316
  misc_feature 1..126: note = Description of Artificial Sequence: Synthetic Construct
  source 1..126: mol_type = other DNA

SEQ ID NO: 4637 - DNA, 126 bp, synthetic construct; identical to SEQ ID NO: 1317
  misc_feature 1..126: note = Description of Artificial Sequence: Synthetic Construct
  source 1..126: mol_type = other DNA

SEQ ID NO: 4638 - DNA, 126 bp, synthetic construct; identical to SEQ ID NO: 1318
  misc_feature 1..126: note = Description of Artificial Sequence: Synthetic Construct
  source 1..126: mol_type = other DNA

SEQ ID NO: 4639 - DNA, 126 bp, synthetic construct; identical to SEQ ID NO: 1319
  misc_feature 1..126: note = Description of Artificial Sequence: Synthetic Construct
  source 1..126: mol_type = other DNA

SEQ ID NO: 4640 - DNA, 63 bp, Homo sapiens; identical to SEQ ID NO: 1321
  source 1..63: mol_type = other DNA

SEQ ID NO: 4641 - DNA, 63 bp, synthetic construct; identical to SEQ ID NO: 1322
  misc_feature 1..63: note = Description of Artificial Sequence: Synthetic Signal Sequence
  source 1..63: mol_type = other DNA

SEQ ID NO: 4642 - DNA, 63 bp, synthetic construct; identical to SEQ ID NO: 1323
  misc_feature 1..63: note = Description of Artificial Sequence: Synthetic Signal Sequence
  source 1..63: mol_type = other DNA

SEQ ID NO: 4643 - DNA, 63 bp, synthetic construct; identical to SEQ ID NO: 1324
  misc_feature 1..63: note = Description of Artificial Sequence: Synthetic Signal Sequence
  source 1..63: mol_type = other DNA

SEQ ID NO: 4644 - DNA, 63 bp, synthetic construct; identical to SEQ ID NO: 1325
  misc_feature 1..63: note = Description of Artificial Sequence: Synthetic Signal Sequence
  source 1..63: mol_type = other DNA

SEQ ID NO: 4645 - DNA, 63 bp, synthetic construct; identical to SEQ ID NO: 1326
  misc_feature 1..63: note = Description of Artificial Sequence: Synthetic Signal Sequence
  source 1..63: mol_type = other DNA

SEQ ID NO: 4646 - DNA, 63 bp, synthetic construct; identical to SEQ ID NO: 1327
  misc_feature 1..63: note = Description of Artificial Sequence: Synthetic Signal Sequence
  source 1..63: mol_type = other DNA

SEQ ID NO: 4647 - DNA, 63 bp, synthetic construct; identical to SEQ ID NO: 1328
  misc_feature 1..63: note = Description of Artificial Sequence: Synthetic Signal Sequence
  source 1..63: mol_type = other DNA

SEQ ID NO: 4648 - DNA, 15 bp, synthetic construct
  misc_feature 1..15: note = Description of Artificial Sequence: Synthetic Linker
  source 1..15: mol_type = other DNA
ggaggctctggagga

SEQ ID NO: 4649 - DNA, 15 bp, synthetic construct
  misc_feature 1..15: note = Description of Artificial Sequence: Synthetic Linker
  source 1..15: mol_type = other DNA
ggaggctccggcgga

SEQ ID NO: 4650 - DNA, 15 bp, synthetic construct
  misc_feature 1..15: note = Description of Artificial Sequence: Synthetic Linker
  source 1..15: mol_type = other DNA
ggaggatccggaggc

SEQ ID NO: 4651 - DNA, 15 bp, synthetic construct
  misc_feature 1..15: note = Description of Artificial Sequence: Synthetic Linker
  source 1..15: mol_type = other DNA
ggaggatctggagga

SEQ ID NO: 4652 - DNA, 36 bp, synthetic construct; identical to SEQ ID NO: 1337
  misc_feature 1..36: note = Description of Artificial Sequence: Synthetic Cleavage site
  source 1..36: mol_type = other DNA

SEQ ID NO: 4653 - DNA, 36 bp, synthetic construct; identical to SEQ ID NO: 1338
  misc_feature 1..36: note = Description of Artificial Sequence: Synthetic Cleavage site
  source 1..36: mol_type = other DNA

SEQ ID NO: 4654 - DNA, 36 bp, synthetic construct; identical to SEQ ID NO: 1339
  misc_feature 1..36: note = Description of Artificial Sequence: Synthetic Cleavage site
  source 1..36: mol_type = other DNA

SEQ ID NO: 4655 - DNA, 561 bp, synthetic construct; identical to SEQ ID NO: 73
  misc_feature 1..561: note = Description of Artificial Sequence: Synthetic Destabilizing Domain (DD)
  source 1..561: mol_type = other DNA

SEQ ID NO: 4656 - DNA, 561 bp, synthetic construct; identical to SEQ ID NO: 77
  misc_feature 1..561: note = Description of Artificial Sequence: Synthetic Destabilizing Domain (DD)
  source 1..561: mol_type = other DNA

SEQ ID NO: 4657 - DNA, 561 bp, synthetic construct; identical to SEQ ID NO: 83
  misc_feature 1..561: note = Description of Artificial Sequence: Synthetic Destabilizing Domain (DD)
  source 1..561: mol_type = other DNA

SEQ ID NO: 4658 - DNA, 561 bp, synthetic construct; identical to SEQ ID NO: 85
  misc_feature 1..561: note = Description of Artificial Sequence: Synthetic Destabilizing Domain (DD)
  source 1..561: mol_type = other DNA

SEQ ID NO: 4659 - DNA, 2034 bp, synthetic construct; identical to SEQ ID NO: 165
  misc_feature 1..2034: note = Description of Artificial Sequence: Synthetic Construct
  source 1..2034: mol_type = other DNA

SEQ ID NO: 4660 - DNA, 2034 bp, synthetic construct; identical to SEQ ID NO: 166
  misc_feature 1..2034: note = Description of Artificial Sequence: Synthetic Construct
  source 1..2034: mol_type = other DNA

SEQ ID NO: 4661 - DNA, 2034 bp, synthetic construct; identical to SEQ ID NO: 167
  misc_feature 1..2034: note = Description of Artificial Sequence: Synthetic Construct
  source 1..2034: mol_type = other DNA

SEQ ID NO: 4662 - DNA, 2034 bp, synthetic construct; identical to SEQ ID NO: 1707
  misc_feature 1..2034: note = Description of Artificial Sequence: Synthetic Construct
  source 1..2034: mol_type = other DNA

SEQ ID NO: 4663 - DNA, 2062 bp, synthetic construct; identical to SEQ ID NO: 174
  misc_feature 1..2062: note = Description of Artificial Sequence: Synthetic Construct
  source 1..2062: mol_type = other DNA

SEQ ID NO: 4664 - DNA, 2061 bp, synthetic construct; identical to SEQ ID NO: 176
  misc_feature 1..2061: note = Description of Artificial Sequence: Synthetic Construct
  source 1..2061: mol_type = other DNA

SEQ ID NO: 4665 - DNA, 2062 bp, synthetic construct; identical to SEQ ID NO: 175
  misc_feature 1..2062: note = Description of Artificial Sequence: Synthetic Construct
  source 1..2062: mol_type = other DNA

SEQ ID NO: 4666 - DNA, 2061 bp, synthetic construct; identical to SEQ ID NO: 177
  misc_feature 1..2061: note = Description of Artificial Sequence: Synthetic Construct
  source 1..2061: mol_type = other DNA

SEQ ID NO: 4667 - protein, 263 aa, synthetic construct; identical to SEQ ID NO: 273
  REGION 1..263: note = Description of Artificial Sequence: Synthetic single chain variable fragment

SEQ ID NO: 4668 - protein, 247 aa, synthetic construct; identical to SEQ ID NO: 274
  REGION 1..247: note = Description of Artificial Sequence: Synthetic single chain variable fragment

SEQ ID NO: 4669 - protein, 242 aa, synthetic construct; identical to SEQ ID NO: 275
  REGION 1..242: note = Description of Artificial Sequence: Synthetic single chain variable fragment

SEQ ID NO: 4670 - protein, 247 aa, synthetic construct; identical to SEQ ID NO: 276
  REGION 1..247: note = Description of Artificial Sequence: Synthetic single chain variable fragment

SEQ ID NO: 4671 - protein, 248 aa, synthetic construct; identical to SEQ ID NO: 277
  REGION 1..248: note = Description of Artificial Sequence: Synthetic single chain variable fragment

SEQ ID NO: 4672 - protein, 242 aa, synthetic construct; identical to SEQ ID NO: 278
  REGION 1..242: note = Description of Artificial Sequence: Synthetic single chain variable fragment

SEQ ID NO: 4673 - protein, 242 aa, synthetic construct; identical to SEQ ID NO: 279
  REGION 1..242: note = Description of Artificial Sequence: Synthetic single chain variable fragment

SEQ ID NO: 4674 - protein, 242 aa, synthetic construct; identical to SEQ ID NO: 280
  REGION 1..242: note = Description of Artificial Sequence: Synthetic single chain variable fragment

SEQ ID NO: 4675 - protein, 246 aa, synthetic construct; identical to SEQ ID NO: 281
  REGION 1..246: note = Description of Artificial Sequence: Synthetic single chain variable fragment

SEQ ID NO: 4676 - protein, 252 aa, synthetic construct; identical to SEQ ID NO: 282
  REGION 1..252: note = Description of Artificial Sequence: Synthetic single chain variable fragment

SEQ ID NO: 4677 - protein, 249 aa, synthetic construct; identical to SEQ ID NO: 283
  REGION 1..249: note = Description of Artificial Sequence: Synthetic single chain variable fragment

SEQ ID NO: 4678 - protein, 249 aa, synthetic construct; identical to SEQ ID NO: 284
  REGION 1..249: note = Description of Artificial Sequence: Synthetic single chain variable fragment

SEQ ID NO: 4679 - protein, 251 aa, synthetic construct; identical to SEQ ID NO: 285
  REGION 1..251: note = Description of Artificial Sequence: Synthetic single chain variable fragment

SEQ ID NO: 4680 - protein, 252 aa, synthetic construct; identical to SEQ ID NO: 286
  REGION 1..252: note = Description of Artificial Sequence: Synthetic single chain variable fragment

SEQ ID NO: 4681 - protein, 252 aa, synthetic construct; identical to SEQ ID NO: 286
  REGION 1..252: note = Description of Artificial Sequence: Synthetic single chain variable fragment

SEQ ID NO: 4682 - protein, 252 aa, synthetic construct; identical to SEQ ID NO: 288
  REGION 1..252: note = Description of Artificial Sequence: Synthetic single chain variable fragment

SEQ ID NO: 4683 - protein, 252 aa, synthetic construct; identical to SEQ ID NO: 288
  REGION 1..252: note = Description of Artificial Sequence: Synthetic single chain variable fragment

SEQ ID NO: 4684 - protein, 252 aa, synthetic construct; identical to SEQ ID NO: 288
  REGION 1..252: note = Description of Artificial Sequence: Synthetic single chain variable fragment

SEQ ID NO: 4685 - protein, 252 aa, synthetic construct; identical to SEQ ID NO: 291
  REGION 1..252: note = Description of Artificial Sequence: Synthetic single chain variable fragment
  MOD_RES 76: note = Any amino acid
  MOD_RES 201: note = Any amino acid

SEQ ID NO: 4686 - protein, 252 aa, synthetic construct; identical to SEQ ID NO: 286
  REGION 1..252: note = Description of Artificial Sequence: Synthetic single chain variable fragment

SEQ ID NO: 4687 - protein, 250 aa, synthetic construct; identical to SEQ ID NO: 293
  REGION 1..250: note = Description of Artificial Sequence: Synthetic single chain variable fragment

SEQ ID NO: 4688 - protein, 252 aa, synthetic construct; identical to SEQ ID NO: 294
  REGION 1..252: note = Description of Artificial Sequence: Synthetic single chain variable fragment

SEQ ID NO: 4689 - protein, 236 aa, synthetic construct; identical to SEQ ID NO: 295
  REGION 1..236: note = Description of Artificial Sequence: Synthetic single chain variable fragment

SEQ ID NO: 4690 - protein, 251 aa, synthetic construct; identical to SEQ ID NO: 296
  REGION 1..251: note = Description of Artificial Sequence: Synthetic single chain variable fragment

SEQ ID NO: 4691 - protein, 246 aa, synthetic construct; identical to SEQ ID NO: 297
  REGION 1..246: note = Description of Artificial Sequence: Synthetic single chain variable fragment

SEQ ID NO: 4692 - protein, 239 aa, synthetic construct; identical to SEQ ID NO: 298
  REGION 1..239: note = Description of Artificial Sequence: Synthetic single chain variable fragment

SEQ ID NO: 4693 - protein, 250 aa, synthetic construct; identical to SEQ ID NO: 299
  REGION 1..250: note = Description of Artificial Sequence: Synthetic single chain variable fragment

SEQ ID NO: 4694 - protein, 251 aa, synthetic construct; identical to SEQ ID NO: 300
  REGION 1..251: note = Description of Artificial Sequence: Synthetic single chain variable fragment

SEQ ID NO: 4695 - protein, 242 aa, synthetic construct; identical to SEQ ID NO: 301
  REGION 1..242: note = Description of Artificial Sequence: Synthetic single chain variable fragment

SEQ ID NO: 4696 - protein, 242 aa, synthetic construct; identical to SEQ ID NO: 302
  REGION 1..242: note = Description of Artificial Sequence: Synthetic single chain variable fragment

SEQ ID NO: 4697 - protein, 246 aa, synthetic construct; identical to SEQ ID NO: 303
  REGION 1..246: note = Description of Artificial Sequence: Synthetic single chain variable fragment

SEQ ID NO: 4698 - protein, 249 aa, synthetic construct; identical to SEQ ID NO: 304
  REGION 1..249: note = Description of Artificial Sequence: Synthetic single chain variable fragment

SEQ ID NO: 4699 - protein, 249 aa, synthetic construct; identical to SEQ ID NO: 305
  REGION 1..249: note = Description of Artificial Sequence: Synthetic single chain variable fragment

SEQ ID NO: 4700 - protein, 252 aa, synthetic construct; identical to SEQ ID NO: 288
  REGION 1..252: note = Description of Artificial Sequence: Synthetic single chain variable fragment

SEQ ID NO: 4701 - protein, 495 aa, synthetic construct; identical to SEQ ID NO: 307
  REGION 1..495: note = Description of Artificial Sequence: Synthetic single chain variable fragment

SEQ ID NO: 4702 - protein, 247 aa, synthetic construct; identical to SEQ ID NO: 308
  REGION 1..247: note = Description of Artificial Sequence: Synthetic single chain variable fragment

SEQ ID NO: 4703 - protein, 251 aa, synthetic construct; identical to SEQ ID NO: 309
  REGION 1..251: note = Description of Artificial Sequence: Synthetic single chain variable fragment

SEQ ID NO: 4704 - protein, 250 aa, synthetic construct; identical to SEQ ID NO: 310
  REGION 1..250: note = Description of Artificial Sequence: Synthetic single chain variable fragment

SEQ ID NO: 4705 - protein, 247 aa, synthetic construct; identical to SEQ ID NO: 311
  REGION 1..247: note = Description of Artificial Sequence: Synthetic single chain variable fragment

SEQ ID NO: 4706 - protein, 248 aa, synthetic construct; identical to SEQ ID NO: 312
  REGION 1..248: note = Description of Artificial Sequence: Synthetic single chain variable fragment

SEQ ID NO: 4707 - protein, 242 aa, synthetic construct; identical to SEQ ID NO: 313
  REGION 1..242: note = Description of Artificial Sequence: Synthetic single chain variable fragment

SEQ ID NO: 4708 - protein, 251 aa, synthetic construct; identical to SEQ ID NO: 314
  REGION 1..251: note = Description of Artificial Sequence: Synthetic single chain variable fragment

SEQ ID NO: 4709 - protein, 247 aa, synthetic construct; identical to SEQ ID NO: 315
  REGION 1..247: note = Description of Artificial Sequence: Synthetic single chain variable fragment

SEQ ID NO: 4710 - protein, 250 aa, synthetic construct; identical to SEQ ID NO: 316
  REGION 1..250: note = Description of Artificial Sequence: Synthetic single chain variable fragment

SEQ ID NO: 4711 - protein, 252 aa, synthetic construct; identical to SEQ ID NO: 317
  REGION 1..252: note = Description of Artificial Sequence: Synthetic single chain variable fragment

SEQ ID NO: 4712 - protein, 247 aa, synthetic construct; identical to SEQ ID NO: 318
  REGION 1..247: note = Description of Artificial Sequence: Synthetic single chain variable fragment

SEQ ID NO: 4713 - protein, 247 aa, synthetic construct; identical to SEQ ID NO: 319
  REGION 1..247: note = Description of Artificial Sequence: Synthetic single chain variable fragment

SEQ ID NO: 4714 - protein, 249 aa, synthetic construct; identical to SEQ ID NO: 320
  REGION 1..249: note = Description of Artificial Sequence: Synthetic single chain variable fragment

SEQ ID NO: 4715 - protein, 251 aa, synthetic construct; identical to SEQ ID NO: 321
  REGION 1..251: note = Description of Artificial Sequence: Synthetic single chain variable fragment

SEQ ID NO: 4716 - protein, 247 aa, synthetic construct; identical to SEQ ID NO: 322
  REGION 1..247: note = Description of Artificial Sequence: Synthetic single chain variable fragment

SEQ ID NO: 4717 - protein, 241 aa, synthetic construct; identical to SEQ ID NO: 323
  REGION 1..241: note = Description of Artificial Sequence: Synthetic single chain variable fragment

SEQ ID NO: 4718 - protein, 248 aa, synthetic construct; identical to SEQ ID NO: 277
  REGION 1..248: note = Description of Artificial Sequence: Synthetic single chain variable fragment

SEQ ID NO: 4719 - protein, 246 aa, synthetic construct; identical to SEQ ID NO: 281
  REGION 1..246: note = Description of Artificial Sequence: Synthetic single chain variable fragment

SEQ ID NO: 4720 - protein, 252 aa, synthetic construct; identical to SEQ ID NO: 282
  REGION 1..252: note = Description of Artificial Sequence: Synthetic single chain variable fragment

SEQ ID NO: 4721 - protein, 249 aa, synthetic construct; identical to SEQ ID NO: 283
  REGION 1..249: note = Description of Artificial Sequence: Synthetic single chain variable fragment

SEQ ID NO: 4722 - protein, 249 aa, synthetic construct; identical to SEQ ID NO: 284
  REGION 1..249: note = Description of Artificial Sequence: Synthetic single chain variable fragment

SEQ ID NO: 4723 - protein, 251 aa, synthetic construct; identical to SEQ ID NO: 285
  REGION 1..251: note = Description of Artificial Sequence: Synthetic single chain variable fragment

SEQ ID NO: 4724 - protein, 252 aa, synthetic construct; identical to SEQ ID NO: 286
  REGION 1..252: note = Description of Artificial Sequence: Synthetic single chain variable fragment

SEQ ID NO: 4725 - protein, 252 aa, synthetic construct; identical to SEQ ID NO: 286
  REGION 1..252: note = Description of Artificial Sequence: Synthetic single chain variable fragment

SEQ ID NO: 4726 - protein, 249 aa, synthetic construct; identical to SEQ ID NO: 332
  REGION 1..249: note = Description of Artificial Sequence: Synthetic single chain variable fragment
  MOD_RES 64..65: note = Any amino acid
  MOD_RES 68..69: note = Any amino acid
  MOD_RES 93: note = Any amino acid
  MOD_RES 98: note = Any amino acid
  MOD_RES 102: note = Any amino acid
  MOD_RES 104: note = Any amino acid
  MOD_RES 113: note = Any amino acid
  MOD_RES 145..146: note = Any amino acid
  MOD_RES 148..149: note = Any amino acid
  MOD_RES 233: note = Any amino acid
  MOD_RES 244: note = Any amino acid

SEQ ID NO: 4727 - protein, 252 aa, synthetic construct; identical to SEQ ID NO: 288
  REGION 1..252: note = Description of Artificial Sequence: Synthetic single chain variable fragment

SEQ ID NO: 4728 - protein, 252 aa, synthetic construct; identical to SEQ ID NO: 288
  REGION 1..252: note = Description of Artificial Sequence: Synthetic single chain variable fragment

SEQ ID NO: 4729 - protein, 252 aa, synthetic construct; identical to SEQ ID NO: 288
  REGION 1..252: note = Description of Artificial Sequence: Synthetic single chain variable fragment

SEQ ID NO: 4730 - protein, 252 aa, synthetic construct; identical to SEQ ID NO: 291
  REGION 1..252: note = Description of Artificial Sequence: Synthetic single chain variable fragment
  MOD_RES 76: note = Any amino acid
  MOD_RES 201: note = Any amino acid

SEQ ID NO: 4731 - protein, 252 aa, synthetic construct; identical to SEQ ID NO: 286
  REGION 1..252: note = Description of Artificial Sequence: Synthetic single chain variable fragment

SEQ ID NO: 4732 - protein, 250 aa, synthetic construct; identical to SEQ ID NO: 293
  REGION 1..250: note = Description of Artificial Sequence: Synthetic single chain variable fragment

SEQ ID NO: 4733 - protein, 252 aa, synthetic construct; identical to SEQ ID NO: 294
  REGION 1..252: note = Description of Artificial Sequence: Synthetic single chain variable fragment

SEQ ID NO: 4734 - protein, 236 aa, synthetic construct; identical to SEQ ID NO: 295
  REGION 1..236: note = Description of Artificial Sequence: Synthetic single chain variable fragment

SEQ ID NO: 4735 - protein, 251 aa, synthetic construct; identical to SEQ ID NO: 296
  REGION 1..251: note = Description of Artificial Sequence: Synthetic single chain variable fragment

SEQ ID NO: 4736 - protein, 246 aa, synthetic construct; identical to SEQ ID NO: 297
  REGION 1..246: note = Description of Artificial Sequence: Synthetic single chain variable fragment

SEQ ID NO: 4737 - protein, 239 aa, synthetic construct; identical to SEQ ID NO: 298
  REGION 1..239: note = Description of Artificial Sequence: Synthetic single chain variable fragment

SEQ ID NO: 4738 - protein, 250 aa, synthetic construct; identical to SEQ ID NO: 299
  REGION 1..250: note = Description of Artificial Sequence: Synthetic single chain variable fragment

SEQ ID NO: 4739 - protein, 251 aa, synthetic construct; identical to SEQ ID NO: 300
  REGION 1..251: note = Description of Artificial Sequence: Synthetic single chain variable fragment

SEQ ID NO: 4740 - protein, 273 aa, synthetic construct; identical to SEQ ID NO: 346
  REGION 1..273: note = Description of Artificial Sequence: Synthetic single chain variable fragment

SEQ ID NO: 4741 - protein, 270 aa, synthetic construct; identical to SEQ ID NO: 347
  REGION 1..270: note = Description of Artificial Sequence: Synthetic single chain variable fragment

SEQ ID NO: 4742 - protein, 277 aa, synthetic construct; identical to SEQ ID NO: 348
  REGION 1..277: note = Description of Artificial Sequence: Synthetic single chain variable fragment

SEQ ID NO: 4743 - protein, 246 aa, synthetic construct; identical to SEQ ID NO: 303
  REGION 1..246: note = Description of Artificial Sequence: Synthetic single chain variable fragment

SEQ ID NO: 4744 - protein, 249 aa, synthetic construct; identical to SEQ ID NO: 304
  REGION 1..249: note = Description of Artificial Sequence: Synthetic single chain variable fragment

SEQ ID NO: 4745 - protein, 249 aa, synthetic construct; identical to SEQ ID NO: 305
  REGION 1..249: note = Description of Artificial Sequence: Synthetic single chain variable fragment

SEQ ID NO: 4746 - protein, 252 aa, synthetic construct; identical to SEQ ID NO: 288
  REGION 1..252: note = Description of Artificial Sequence: Synthetic single chain variable fragment

SEQ ID NO: 4747 - protein, 251 aa, synthetic construct; identical to SEQ ID NO: 309
  REGION 1..251: note = Description of Artificial Sequence: Synthetic single chain variable fragment

SEQ ID NO: 4748 - protein, 250 aa, synthetic construct; identical to SEQ ID NO: 310
  REGION 1..250: note = Description of Artificial Sequence: Synthetic single chain variable fragment

SEQ ID NO: 4749 - protein, 247 aa, synthetic construct; identical to SEQ ID NO: 311
  REGION 1..247: note = Description of Artificial Sequence: Synthetic single chain variable fragment

SEQ ID NO: 4750 - protein, 248 aa, synthetic construct; identical to SEQ ID NO: 312
  REGION 1..248: note = Description of Artificial Sequence: Synthetic single chain variable fragment

SEQ ID NO: 4751 - protein, 251 aa, synthetic construct; identical to SEQ ID NO: 314
  REGION 1..251: note = Description of Artificial Sequence: Synthetic single chain variable fragment

SEQ ID NO: 4752 - protein, 250 aa, synthetic construct; identical to SEQ ID NO: 316
  REGION 1..250: note = Description of Artificial Sequence: Synthetic single chain variable fragment

SEQ ID NO: 4753 - protein, 249 aa, synthetic construct; identical to SEQ ID NO: 320
  REGION 1..249: note = Description of Artificial Sequence: Synthetic single chain variable fragment

SEQ ID NO: 4754 - protein, 251 aa, synthetic construct; identical to SEQ ID NO: 321
  REGION 1..251: note = Description of Artificial Sequence: Synthetic single chain variable fragment

SEQ ID NO: 4755 - protein, 249 aa, synthetic construct; identical to SEQ ID NO: 284
  REGION 1..249: note = Description of Artificial Sequence: Synthetic single chain variable fragment

SEQ ID NO: 4756 - protein, 242 aa, synthetic construct; identical to SEQ ID NO: 275
  REGION 1..242: note = Description of Artificial Sequence: Synthetic single chain variable fragment

SEQ ID NO: 4757 - protein, 245 aa, synthetic construct; identical to SEQ ID NO: 363
  REGION 1..245: note = Description of Artificial Sequence: Synthetic single chain variable fragment

SEQ ID NO: 4758 - protein, 119 aa, synthetic construct; identical to SEQ ID NO: 364
  REGION 1..119: note = Description of Artificial Sequence: Synthetic single chain variable fragment

SEQ ID NO: 4759 - protein, 438 aa, synthetic construct; identical to SEQ ID NO: 365
  REGION 1..438: note = Description of Artificial Sequence: Synthetic single chain variable fragment

SEQ ID NO: 4760 - protein, 272 aa, synthetic construct; identical to SEQ ID NO: 366
  REGION 1..272: note = Description of Artificial Sequence: Synthetic single chain variable fragment

SEQ ID NO: 4761 - protein, 267 aa, synthetic construct; identical to SEQ ID NO: 367
  REGION 1..267: note = Description of Artificial Sequence: Synthetic single chain variable fragment

SEQ ID NO: 4762 - protein, 270 aa, synthetic construct; identical to SEQ ID NO: 347
  REGION 1..270: note = Description of Artificial Sequence: Synthetic single chain variable fragment

SEQ ID NO: 4763 - protein, 277 aa, synthetic construct; identical to SEQ ID NO: 348
  REGION 1..277: note = Description of Artificial Sequence: Synthetic single chain variable fragment

SEQ ID NO: 4764 - protein, 242 aa, synthetic construct; identical to SEQ ID NO: 280
  REGION 1..242: note = Description of Artificial Sequence: Synthetic single chain variable fragment

SEQ ID NO: 4765 - protein, 242 aa, synthetic construct; identical to SEQ ID NO: 301
  REGION 1..242: note = Description of Artificial Sequence: Synthetic single chain variable fragment

SEQ ID NO: 4766 - protein, 242 aa, synthetic construct; identical to SEQ ID NO: 302
  REGION 1..242: note = Description of Artificial Sequence: Synthetic single chain variable fragment

SEQ ID NO: 4767 - protein, 247 aa, synthetic construct; identical to SEQ ID NO: 308
  REGION 1..247: note = Description of Artificial Sequence: Synthetic single chain variable fragment

SEQ ID NO: 4768 - protein, 247 aa, synthetic construct; identical to SEQ ID NO: 315
  REGION 1..247: note = Description of Artificial Sequence: Synthetic single chain variable fragment

SEQ ID NO: 4769 - protein, 247 aa, synthetic construct; identical to SEQ ID NO: 318
  REGION 1..247: note = Description of Artificial Sequence: Synthetic single chain variable fragment

SEQ ID NO: 4770 - protein, 247 aa, synthetic construct; identical to SEQ ID NO: 319
  REGION 1..247: note = Description of Artificial Sequence: Synthetic single chain variable fragment

SEQ ID NO: 4771 - protein, 247 aa, synthetic construct; identical to SEQ ID NO: 322
  REGION 1..247: note = Description of Artificial Sequence: Synthetic single chain variable fragment

SEQ ID NO: 4772 - protein, 247 aa, synthetic construct; identical to SEQ ID NO: 276
  REGION 1..247: note = Description of Artificial Sequence: Synthetic single chain variable fragment

SEQ ID NO: 4773 - protein, 242 aa, synthetic construct; identical to SEQ ID NO: 278
  REGION 1..242: note = Description of Artificial Sequence: Synthetic single chain variable fragment

SEQ ID NO: 4774 - protein, 495 aa, synthetic construct; identical to SEQ ID NO: 307
  REGION 1..495: note = Description of Artificial Sequence: Synthetic single chain variable fragment

SEQ ID NO: 4775 - protein, 242 aa, synthetic construct; identical to SEQ ID NO: 279
  REGION 1..242: note = Description of Artificial Sequence: Synthetic single chain variable fragment

SEQ ID NO: 4776 - protein, 242 aa, synthetic construct; identical to SEQ ID NO: 313
  REGION 1..242: note = Description of Artificial Sequence: Synthetic single chain variable fragment

SEQ ID NO: 4777 - protein, 252 aa, synthetic construct; identical to SEQ ID NO: 317
  REGION 1..252: note = Description of Artificial Sequence: Synthetic single chain variable fragment

SEQ ID NO: 4778 - protein, 250 aa, synthetic construct; identical to SEQ ID NO: 384
  REGION 1..250: note = Description of Artificial Sequence: Synthetic single chain variable fragment

SEQ ID NO: 4779 - protein, 242 aa, synthetic construct; identical to SEQ ID NO: 313
  REGION 1..242: note = Description of Artificial Sequence: Synthetic single chain variable fragment

SEQ ID NO: 4780 - protein, 251 aa, synthetic construct; identical to SEQ ID NO: 386
  REGION 1..251: note = Description of Artificial Sequence: Synthetic single chain variable fragment

SEQ ID NO: 4781 - protein, 271 aa, synthetic construct; identical to SEQ ID NO: 387
  REGION 1..271: note = Description of Artificial Sequence: Synthetic single chain variable fragment

SEQ ID NO: 4782 - protein, 248 aa, synthetic construct; identical to SEQ ID NO: 277
  REGION 1..248: note = Description of Artificial Sequence: Synthetic single chain variable fragment

SEQ ID NO: 4783 - protein, 246 aa, synthetic construct; identical to SEQ ID NO: 281
  REGION 1..246: note = Description of Artificial Sequence: Synthetic single chain variable fragment

SEQ ID NO: 4784 - protein, 252 aa, synthetic construct; identical to SEQ ID NO: 282
  REGION 1..252: note = Description of Artificial Sequence: Synthetic single chain variable fragment

SEQ ID NO: 4785 - protein, 249 aa, synthetic construct; identical to SEQ ID NO: 283
  REGION 1..249: note = Description of Artificial Sequence: Synthetic single chain variable fragment

SEQ ID NO: 4786 - protein, 251 aa, synthetic construct; identical to SEQ ID NO: 285
  REGION 1..251: note = Description of Artificial Sequence: Synthetic single chain variable fragment

SEQ ID NO: 4787 - protein, 252 aa, synthetic construct; identical to SEQ ID NO: 286
  REGION 1..252: note = Description of Artificial Sequence: Synthetic single chain variable fragment

SEQ ID NO: 4788 - protein, 249 aa, synthetic construct; identical to SEQ ID NO: 332
  REGION 1..249: note = Description of Artificial Sequence: Synthetic single chain variable fragment
  MOD_RES 64..65: note = Any amino acid
  MOD_RES 68..69: note = Any amino acid
  MOD_RES 93: note = Any amino acid
  MOD_RES 98: note = Any amino acid
  MOD_RES 102: note = Any amino acid
  MOD_RES 104: note = Any amino acid
  MOD_RES 113: note = Any amino acid
  MOD_RES 145..146: note = Any amino acid
  MOD_RES 148..149: note = Any amino acid
  MOD_RES 233: note = Any amino acid
  MOD_RES 244: note = Any amino acid

SEQ ID NO: 4789 - protein, 252 aa, synthetic construct; identical to SEQ ID NO: 291
  REGION 1..252: note = Description of Artificial Sequence: Synthetic single chain variable fragment
  MOD_RES 76: note = Any amino acid
  MOD_RES 201: note = Any amino acid

SEQ ID NO: 4790 - protein, 250 aa, synthetic construct; identical to SEQ ID NO: 293
  REGION 1..250: note = Description of Artificial Sequence: Synthetic single chain variable fragment

SEQ ID NO: 4791 - protein, 252 aa, synthetic construct; identical to SEQ ID NO: 294
  REGION 1..252: note = Description of Artificial Sequence: Synthetic single chain variable fragment

SEQ ID NO: 4792 - protein, 236 aa, synthetic construct; identical to SEQ ID NO: 295
  REGION 1..236: note = Description of Artificial Sequence: Synthetic single chain variable fragment

SEQ ID NO: 4793 - protein, 251 aa, synthetic construct; identical to SEQ ID NO: 296
  REGION 1..251: note = Description of Artificial Sequence: Synthetic single chain variable fragment

SEQ ID NO: 4794 - protein, 246 aa, synthetic construct; identical to SEQ ID NO: 297
  REGION 1..246: note = Description of Artificial Sequence: Synthetic single chain variable fragment

SEQ ID NO: 4795 - protein, 239 aa, synthetic construct; identical to SEQ ID NO: 298
  REGION 1..239: note = Description of Artificial Sequence: Synthetic single chain variable fragment

SEQ ID NO: 4796 - protein, 250 aa, synthetic construct; identical to SEQ ID NO: 299
  REGION 1..250: note = Description of Artificial Sequence: Synthetic single chain variable fragment

SEQ ID NO: 4797 - protein, 251 aa, synthetic construct; identical to SEQ ID NO: 300
  REGION 1..251: note = Description of Artificial Sequence: Synthetic single chain variable fragment

SEQ ID NO: 4798 - protein, 246 aa, synthetic construct; identical to SEQ ID NO: 303
  REGION 1..246: note = Description of Artificial Sequence: Synthetic single chain variable fragment

SEQ ID NO: 4799 - protein, 249 aa, synthetic construct; identical to SEQ ID NO: 304
  REGION 1..249: note = Description of Artificial Sequence: Synthetic single chain variable fragment

SEQ ID NO: 4800 - protein, 249 aa, synthetic construct; identical to SEQ ID NO: 305
  REGION 1..249: note = Description of Artificial Sequence: Synthetic single chain variable fragment

SEQ ID NO: 4801 - protein, 252 aa, synthetic construct; identical to SEQ ID NO: 288
  REGION 1..252: note = Description of Artificial Sequence: Synthetic single chain variable fragment

SEQ ID NO: 4802 - protein, 251 aa, synthetic construct; identical to SEQ ID NO: 309
  REGION 1..251: note = Description of Artificial Sequence: Synthetic single chain variable fragment

SEQ ID NO: 4803 - protein, 250 aa, synthetic construct; identical to SEQ ID NO: 310
  REGION 1..250: note = Description of Artificial Sequence: Synthetic single chain variable fragment

SEQ ID NO: 4804 - protein, 247 aa, synthetic construct; identical to SEQ ID NO: 311
  REGION 1..247: note = Description of Artificial Sequence: Synthetic single chain variable fragment

SEQ ID NO: 4805 - protein, 248 aa, synthetic construct; identical to SEQ ID NO: 312
  REGION 1..248: note = Description of Artificial Sequence: Synthetic single chain variable fragment

SEQ ID NO: 4806 - protein, 251 aa, synthetic construct; identical to SEQ ID NO: 314
  REGION 1..251: note = Description of Artificial Sequence: Synthetic single chain variable fragment

SEQ ID NO: 4807 - protein, 250 aa, synthetic construct; identical to SEQ ID NO: 316
  REGION 1..250: note = Description of Artificial Sequence: Synthetic single chain variable fragment

SEQ ID NO: 4808 - protein, 249 aa, synthetic construct; identical to SEQ ID NO: 320
  REGION 1..249: note = Description of Artificial Sequence: Synthetic single chain variable fragment

SEQ ID NO: 4809 - protein, 251 aa, synthetic construct; identical to SEQ ID NO: 321
  REGION 1..251: note = Description of Artificial Sequence: Synthetic single chain variable fragment

SEQ ID NO: 4810 - protein, 249 aa, synthetic construct; identical to SEQ ID NO: 284
  REGION 1..249: note = Description of Artificial Sequence: Synthetic single chain variable fragment

SEQ ID NO: 4811 - protein, 277 aa, synthetic construct; identical to SEQ ID NO: 417
  REGION 1..277: note = Description of Artificial Sequence: Synthetic single chain variable fragment

SEQ ID NO: 4812 - protein, 246 aa, synthetic construct; identical to SEQ ID NO: 765
  REGION 1..246: note = Description of Artificial Sequence: Synthetic scFV sequence

SEQ ID NO: 4813 - protein, 246 aa, synthetic construct; identical to SEQ ID NO: 766
  REGION 1..246: note = Description of Artificial Sequence: Synthetic scFV sequence

SEQ ID NO: 4814 - protein, 245 aa, synthetic construct; identical to SEQ ID NO: 767
  REGION 1..245: note = Description of Artificial Sequence: Synthetic scFV sequence

SEQ ID NO: 4815 - protein, 242 aa, synthetic construct; identical to SEQ ID NO: 768
  REGION 1..242: note = Description of Artificial Sequence: Synthetic scFV sequence

SEQ ID NO: 4816 - protein, 248 aa, synthetic construct; identical to SEQ ID NO: 769
  REGION 1..248: note = Description of Artificial Sequence: Synthetic scFV sequence

SEQ ID NO: 4817 - protein, 247 aa, synthetic construct; identical to SEQ ID NO: 770
  REGION 1..247: note = Description of Artificial Sequence: Synthetic scFV sequence

SEQ ID NO: 4818 - protein, 246 aa, synthetic construct; identical to SEQ ID NO: 771
  REGION 1..246: note = Description of Artificial Sequence: Synthetic scFV sequence

SEQ ID NO: 4819 - protein, 243 aa, synthetic construct; identical to SEQ ID NO: 772
  REGION 1..243: note = Description of Artificial Sequence: Synthetic scFV sequence

SEQ ID NO: 4820 - protein, 236 aa, synthetic construct; identical to SEQ ID NO: 778
  REGION 1..236: note = Description of Artificial Sequence: Synthetic scFV sequence

SEQ ID NO: 4821 - protein, 245 aa, synthetic construct; identical to SEQ ID NO: 779
  REGION 1..245: note = Description of Artificial Sequence: Synthetic scFV sequence

SEQ ID NO: 4822 - protein, 245 aa, synthetic construct; identical to SEQ ID NO: 780
  REGION 1..245: note = Description of Artificial Sequence: Synthetic scFV sequence

SEQ ID NO: 4823 - protein, 244 aa, synthetic construct; identical to SEQ ID NO: 789
  REGION 1..244: note = Description of Artificial Sequence: Synthetic scFV sequence

SEQ ID NO: 4824 - protein, 244 aa, synthetic construct; identical to SEQ ID NO: 790
  REGION 1..244: note = Description of Artificial Sequence: Synthetic scFV sequence

SEQ ID NO: 4825 - protein, 248 aa, synthetic construct; identical to SEQ ID NO: 791
  REGION 1..248: note = Description of Artificial Sequence: Synthetic scFV sequence

SEQ ID NO: 4826 - protein, 242 aa, synthetic construct; identical to SEQ ID NO: 792
  REGION 1..242: note = Description of Artificial Sequence: Synthetic scFV sequence

SEQ ID NO: 4827 - protein, 518 aa, synthetic construct; identical to SEQ ID NO: 872
  REGION 1..518: note = Description of Artificial Sequence: Synthetic scFV sequence

SEQ ID NO: 4828 - protein, 524 aa, synthetic construct; identical to SEQ ID NO: 873
  REGION 1..524: note = Description of Artificial Sequence: Synthetic scFV sequence

SEQ ID NO: 4829 - protein, 248 aa, synthetic construct; identical to SEQ ID NO: 874
  REGION 1..248: note = Description of Artificial Sequence: Synthetic scFV sequence

SEQ ID NO: 4830 - protein, 225 aa, synthetic construct; identical to SEQ ID NO: 875
  REGION 1..225: note = Description of Artificial Sequence: Synthetic scFV sequence

SEQ ID NO: 4831 - protein, 244 aa, synthetic construct; identical to SEQ ID NO: 876
  REGION 1..244: note = Description of Artificial Sequence: Synthetic scFV sequence

SEQ ID NO: 4832 - protein, 230 aa, synthetic construct; identical to SEQ ID NO: 877
  REGION 1..230: note = Description of Artificial Sequence: Synthetic scFV sequence

SEQ ID NO: 4833 - protein, 241 aa, synthetic construct; identical to SEQ ID NO: 878
  REGION 1..241: note = Description of Artificial Sequence: Synthetic scFV sequence

SEQ ID NO: 4834 - protein, 249 aa, synthetic construct; identical to SEQ ID NO: 879
  REGION 1..249: note = Description of Artificial Sequence: Synthetic scFV sequence

SEQ ID NO: 4835 - protein, 244 aa, synthetic construct; identical to SEQ ID NO: 880
  REGION 1..244: note = Description of Artificial Sequence: Synthetic scFV sequence

SEQ ID NO: 4836 - protein, 243 aa, synthetic construct; identical to SEQ ID NO: 881
  REGION 1..243: note = Description of Artificial Sequence: Synthetic scFV sequence

SEQ ID NO: 4837 - protein, 241 aa, synthetic construct; identical to SEQ ID NO: 882
  REGION 1..241: note = Description of Artificial Sequence: Synthetic scFV sequence

SEQ ID NO: 4838 - protein, 239 aa, synthetic construct; identical to SEQ ID NO: 883
  REGION 1..239: note = Description of Artificial Sequence: Synthetic scFV sequence

SEQ ID NO: 4839 - protein, 239 aa, synthetic construct; identical to SEQ ID NO: 884
  REGION 1..239: note = Description of Artificial Sequence: Synthetic scFV sequence

SEQ ID NO: 4840 - protein, 239 aa, synthetic construct; identical to SEQ ID NO: 885
  REGION 1..239: note = Description of Artificial Sequence: Synthetic scFV sequence

SEQ ID NO: 4841 - protein, 239 aa, synthetic construct; identical to SEQ ID NO: 886
  REGION 1..239: note = Description of Artificial Sequence: Synthetic scFV sequence

SEQ ID NO: 4842 - protein, 239 aa, synthetic construct; identical to SEQ ID NO: 887
  REGION 1..239: note = Description of Artificial Sequence: Synthetic scFV sequence

SEQ ID NO: 4843 - protein, 239 aa, synthetic construct; identical to SEQ ID NO: 888
  REGION 1..239: note = Description of Artificial Sequence: Synthetic scFV sequence

SEQ ID NO: 4844 - protein, 239 aa, synthetic construct; identical to SEQ ID NO: 889
  REGION 1..239: note = Description of Artificial Sequence: Synthetic scFV sequence

SEQ ID NO: 4845 - protein, 239 aa, synthetic construct; identical to SEQ ID NO: 890
  REGION 1..239: note = Description of Artificial Sequence: Synthetic scFV sequence

SEQ ID NO: 4846 - protein, 239 aa, synthetic construct; identical to SEQ ID NO: 891
  REGION 1..239: note = Description of Artificial Sequence: Synthetic scFV sequence

SEQ ID NO: 4847 - protein, 239 aa, synthetic construct; identical to SEQ ID NO: 892
  REGION 1..239: note = Description of Artificial Sequence: Synthetic scFV sequence

SEQ ID NO: 4848 - protein, 239 aa, synthetic construct; identical to SEQ ID NO: 893
  REGION 1..239: note = Description of Artificial Sequence: Synthetic scFV sequence

SEQ ID NO: 4849 - protein, 239 aa, synthetic construct; identical to SEQ ID NO: 894
  REGION 1..239: note = Description of Artificial Sequence: Synthetic scFV sequence

SEQ ID NO: 4850 - protein, 239 aa, synthetic construct; identical to SEQ ID NO: 895
  REGION 1..239: note = Description of Artificial Sequence: Synthetic scFV sequence

SEQ ID NO: 4851 - protein, 239 aa, synthetic construct; identical to SEQ ID NO: 896
  REGION 1..239: note = Description of Artificial Sequence: Synthetic scFV sequence

SEQ ID NO: 4852 - protein, 100 aa, synthetic construct; identical to SEQ ID NO: 897
  REGION 1..100: note = Description of Artificial Sequence: Synthetic scFV sequence

SEQ ID NO: 4853 - protein, 139 aa, synthetic construct; identical to SEQ ID NO: 898
  REGION 1..139: note = Description of Artificial Sequence: Synthetic scFV sequence

SEQ ID NO: 4854 - protein, 243 aa, synthetic construct; identical to SEQ ID NO: 899
  REGION 1..243: note = Description of Artificial Sequence: Synthetic scFV sequence

SEQ ID NO: 4855 - protein, 242 aa, synthetic construct; identical to SEQ ID NO: 900
  REGION 1..242: note = Description of Artificial Sequence: Synthetic scFV sequence

SEQ ID NO: 4856 - protein, 263 aa, synthetic construct; identical to SEQ ID NO: 973
  REGION 1..263: note = Description of Artificial Sequence: Synthetic scFV sequence

SEQ ID NO: 4857 - protein, 242 aa, synthetic construct; identical to SEQ ID NO: 974
  REGION 1..242: note = Description of Artificial Sequence: Synthetic scFV sequence

SEQ ID NO: 4858 - protein, 477 aa, synthetic construct; identical to SEQ ID NO: 975
  REGION 1..477: note = Description of Artificial Sequence: Synthetic scFV sequence

SEQ ID NO: 4859 - protein, 291 aa, synthetic construct; identical to SEQ ID NO: 976
  REGION 1..291: note = Description of Artificial Sequence: Synthetic scFV sequence

SEQ ID NO: 4860 - protein, 291 aa, synthetic construct; identical to SEQ ID NO: 977
  REGION 1..291: note = Description of Artificial Sequence: Synthetic scFV sequence

SEQ ID NO: 4861 - protein, 665 aa, synthetic construct; identical to SEQ ID NO: 978
  REGION 1..665: note = Description of Artificial Sequence: Synthetic scFV sequence

SEQ ID NO: 4862 - protein, 278 aa, synthetic construct; identical to SEQ ID NO: 979
  REGION 1..278: note = Description of Artificial Sequence: Synthetic scFV sequence

SEQ ID NO: 4863 - protein, 280 aa, synthetic construct; identical to SEQ ID NO: 980
  REGION 1..280: note = Description of Artificial Sequence: Synthetic scFV sequence

SEQ ID NO: 4864 - protein, 680 aa, synthetic construct; identical to SEQ ID NO: 1354
  REGION 1..680: note = Description of Artificial Sequence: Synthetic chimeric antigen receptor

SEQ ID NO: 4865 - protein, 680 aa, synthetic construct; identical to SEQ ID NO: 1355
  REGION 1..680: note = Description of Artificial Sequence: Synthetic chimeric antigen receptor

SEQ ID NO: 4866 - protein, 680 aa, synthetic construct; identical to SEQ ID NO: 1356
  REGION 1..680: note = Description of Artificial Sequence: Synthetic chimeric antigen receptor

SEQ ID NO: 4867 - protein, 580 aa, synthetic construct; identical to SEQ ID NO: 1357
  REGION 1..580: note = Description of Artificial Sequence: Synthetic chimeric antigen receptor

SEQ ID NO: 4868 - protein, 711 aa, synthetic construct; identical to SEQ ID NO: 1358
  REGION 1..711: note = Description of Artificial Sequence: Synthetic chimeric antigen receptor

SEQ ID NO: 4869 - protein, 495 aa, synthetic construct; identical to SEQ ID NO: 1359
  REGION 1..495: note = Description of Artificial Sequence: Synthetic chimeric antigen receptor

SEQ ID NO: 4870 - protein, 495 aa, synthetic construct; identical to SEQ ID NO: 307
  REGION 1..495: note = Description of Artificial Sequence: Synthetic chimeric antigen receptor

SEQ ID NO: 4871 - protein, 484 aa, synthetic construct; identical to SEQ ID NO: 1361
  REGION 1..484: note = Description of Artificial Sequence: Synthetic chimeric antigen receptor

SEQ ID NO: 4872 - protein, 476 aa, synthetic construct; identical to SEQ ID NO: 1362
  REGION 1..476: note = Description of Artificial Sequence: Synthetic chimeric antigen receptor

SEQ ID NO: 4873 - protein, 248 aa, synthetic construct; identical to SEQ ID NO: 1363
  REGION 1..248: note = Description of Artificial Sequence: Synthetic chimeric antigen receptor

SEQ ID NO: 4874 - protein, 254 aa, synthetic construct; identical to SEQ ID NO: 1364
  REGION 1..254: note = Description of Artificial Sequence: Synthetic chimeric antigen receptor

SEQ ID NO: 4875 - protein, 489 aa, synthetic construct; identical to SEQ ID NO: 1365
  REGION 1..489: note = Description of Artificial Sequence: Synthetic chimeric antigen receptor

SEQ ID NO: 4876 - protein, 522 aa, synthetic construct; identical to SEQ ID NO: 1366
  REGION 1..522: note = Description of Artificial Sequence: Synthetic chimeric antigen receptor

SEQ ID NO: 4877 - protein, 508 aa, synthetic construct; identical to SEQ ID NO: 1367
  REGION 1..508: note = Description of Artificial Sequence: Synthetic chimeric antigen receptor

SEQ ID NO: 4878 - protein, 528 aa, synthetic construct; identical to SEQ ID NO: 1368
  REGION 1..528: note = Description of Artificial Sequence: Synthetic chimeric antigen receptor

SEQ ID NO: 4879 - protein, 514 aa, synthetic construct; identical to SEQ ID NO: 1369
  REGION 1..514: note = Description of Artificial Sequence: Synthetic chimeric antigen receptor

SEQ ID NO: 4880 - protein, 522 aa, synthetic construct; identical to SEQ ID NO: 1370
  REGION 1..522: note = Description of Artificial Sequence: Synthetic chimeric antigen receptor

SEQ ID NO: 4881 - protein, 508 aa, synthetic construct; identical to SEQ ID NO: 1371
  REGION 1..508: note = Description of Artificial Sequence: Synthetic chimeric antigen receptor

SEQ ID NO: 4882 - protein, 495 aa, synthetic construct; identical to SEQ ID NO: 307
  REGION 1..495: note = Description of Artificial Sequence: Synthetic chimeric antigen receptor

SEQ ID NO: 4883 - protein, 495 aa, synthetic construct; identical to SEQ ID NO: 307
  REGION 1..495: note = Description of Artificial Sequence: Synthetic chimeric antigen receptor

SEQ ID NO: 4884 - protein, 495 aa, synthetic construct; identical to SEQ ID NO: 307
  REGION 1..495: note = Description of Artificial Sequence: Synthetic chimeric antigen receptor

SEQ ID NO: 4885 - protein, 495 aa, synthetic construct; identical to SEQ ID NO: 307
  REGION 1..495: note = Description of Artificial Sequence: Synthetic chimeric antigen receptor

SEQ ID NO: 4886 - protein, 495 aa, synthetic construct; identical to SEQ ID NO: 307
  REGION 1..495: note = Description of Artificial Sequence: Synthetic chimeric antigen receptor

SEQ ID NO: 4887 - protein, 495 aa, synthetic construct; identical to SEQ ID NO: 307
  REGION 1..495: note = Description of Artificial Sequence: Synthetic chimeric antigen receptor

SEQ ID NO: 4888 - protein, 495 aa, synthetic construct; identical to SEQ ID NO: 307
  REGION 1..495: note = Description of Artificial Sequence: Synthetic chimeric antigen receptor

SEQ ID NO: 4889 - protein, 495 aa, synthetic construct; identical to SEQ ID NO: 307
  REGION 1..495: note = Description of Artificial Sequence: Synthetic chimeric antigen receptor

SEQ ID NO: 4890 - protein, 251 aa, synthetic construct; identical to SEQ ID NO: 386
  REGION 1..251: note = Description of Artificial Sequence: Synthetic chimeric antigen receptor

SEQ ID NO: 4891 - protein, 495 aa, synthetic construct; identical to SEQ ID NO: 307
  REGION 1..495: note = Description of Artificial Sequence: Synthetic chimeric antigen receptor

SEQ ID NO: 4892 - protein, 495 aa, synthetic construct; identical to SEQ ID NO: 307
  REGION 1..495: note = Description of Artificial Sequence: Synthetic chimeric antigen receptor

SEQ ID NO: 4893 - protein, 495 aa, synthetic construct; identical to SEQ ID NO: 307
  REGION 1..495: note = Description of Artificial Sequence: Synthetic chimeric antigen receptor

SEQ ID NO: 4894 - protein, 495 aa, synthetic construct; identical to SEQ ID NO: 1359
  REGION 1..495: note = Description of Artificial Sequence: Synthetic chimeric antigen receptor

SEQ ID NO: 4895 - protein, 495 aa, synthetic construct; identical to SEQ ID NO: 307
  REGION 1..495: note = Description of Artificial Sequence: Synthetic chimeric antigen receptor

SEQ ID NO: 4896 - protein, 495 aa, synthetic construct; identical to SEQ ID NO: 1359
  REGION 1..495: note = Description of Artificial Sequence: Synthetic chimeric antigen receptor

SEQ ID NO: 4897 - protein, 495 aa, synthetic construct; identical to SEQ ID NO: 307
  REGION 1..495: note = Description of Artificial Sequence: Synthetic chimeric antigen receptor

SEQ ID NO: 4898 - protein, 495 aa, synthetic construct; identical to SEQ ID NO: 1359
  REGION 1..495: note = Description of Artificial Sequence: Synthetic chimeric antigen receptor

SEQ ID NO: 4899 - protein, 495 aa, synthetic construct; identical to SEQ ID NO: 307
  REGION 1..495: note = Description of Artificial Sequence: Synthetic chimeric antigen receptor

SEQ ID NO: 4900 - protein, 494 aa, synthetic construct; identical to SEQ ID NO: 1390
  REGION 1..494: note = Description of Artificial Sequence: Synthetic chimeric antigen receptor

SEQ ID NO: 4901 - protein, 494 aa, synthetic construct; identical to SEQ ID NO: 1390
  REGION 1..494: note = Description of Artificial Sequence: Synthetic chimeric antigen receptor

SEQ ID NO: 4902 - protein, 144 aa, synthetic construct; identical to SEQ ID NO: 1392
  REGION 1..144: note = Description of Artificial Sequence: Synthetic chimeric antigen receptor

SEQ ID NO: 4903 - protein, 486 aa, synthetic construct; identical to SEQ ID NO: 1393
  REGION 1..486: note = Description of Artificial Sequence: Synthetic chimeric antigen receptor

SEQ ID NO: 4904 - protein, 486 aa, synthetic construct; identical to SEQ ID NO: 1394
  REGION 1..486: note = Description of Artificial Sequence: Synthetic chimeric antigen receptor

SEQ ID NO: 4905 - protein, 486 aa, synthetic construct; identical to SEQ ID NO: 1395
  REGION 1..486: note = Description of Artificial Sequence: Synthetic chimeric antigen receptor

SEQ ID NO: 4906 - protein, 486 aa, synthetic construct; identical to SEQ ID NO: 1396
  REGION 1..486: note = Description of Artificial Sequence: Synthetic chimeric antigen receptor

SEQ ID NO: 4907 - protein, 491 aa, synthetic construct; identical to SEQ ID NO: 1397
  REGION 1..491: note = Description of Artificial Sequence: Synthetic chimeric antigen receptor

SEQ ID NO: 4908 - protein, 491 aa, synthetic construct; identical to SEQ ID NO: 1398
  REGION 1..491: note = Description of Artificial Sequence: Synthetic chimeric antigen receptor

SEQ ID NO: 4909 - protein, 491 aa, synthetic construct; identical to SEQ ID NO: 1399
  REGION 1..491: note = Description of Artificial Sequence: Synthetic chimeric antigen receptor

SEQ ID NO: 4910 - protein, 491 aa, synthetic construct; identical to SEQ ID NO: 1400
  REGION 1..491: note = Description of Artificial Sequence: Synthetic chimeric antigen receptor

SEQ ID NO: 4911 - protein, 491 aa, synthetic construct; identical to SEQ ID NO: 1401
  REGION 1..491: note = Description of Artificial Sequence: Synthetic chimeric antigen receptor

SEQ ID NO: 4912 - protein, 491 aa, synthetic construct; identical to SEQ ID NO: 1401
  REGION 1..491: note = Description of Artificial Sequence: Synthetic chimeric antigen receptor

SEQ ID NO: 4913 - protein, 491 aa, synthetic construct; identical to SEQ ID NO: 1403
  REGION 1..491: note = Description of Artificial Sequence: Synthetic chimeric antigen receptor

SEQ ID NO: 4914 - protein, 486 aa, synthetic construct; identical to SEQ ID NO: 1404
  REGION 1..486: note = Description of Artificial Sequence: Synthetic chimeric antigen receptor

SEQ ID NO: 4915 - protein, 486 aa, synthetic construct; identical to SEQ ID NO: 669
  REGION 1..486: note = Description of Artificial Sequence: Synthetic chimeric antigen receptor

SEQ ID NO: 4916 - protein, 495 aa, synthetic construct; identical to SEQ ID NO: 1359
  REGION 1..495: note = Description of Artificial Sequence: Synthetic chimeric antigen receptor

SEQ ID NO: 4917 - protein, 495 aa, synthetic construct; identical to SEQ ID NO: 307
  REGION 1..495: note = Description of Artificial Sequence: Synthetic chimeric antigen receptor

SEQ ID NO: 4918 - protein, 530 aa, synthetic construct; identical to SEQ ID NO: 1408
  REGION 1..530: note = Description of Artificial Sequence: Synthetic chimeric antigen receptor

SEQ ID NO: 4919 - protein, 486 aa, synthetic construct; identical to SEQ ID NO: 1394
  REGION 1..486: note = Description of Artificial Sequence: Synthetic chimeric antigen receptor

SEQ ID NO: 4920 - protein, 486 aa, synthetic construct; identical to SEQ ID NO: 1395
  REGION 1..486: note = Description of Artificial Sequence: Synthetic chimeric antigen receptor

SEQ ID NO: 4921 - protein, 486 aa, synthetic construct; identical to SEQ ID NO: 1396
  REGION 1..486: note = Description of Artificial Sequence: Synthetic chimeric antigen receptor

SEQ ID NO: 4922 - protein, 491 aa, synthetic construct; identical to SEQ ID NO: 1397
  REGION 1..491: note = Description of Artificial Sequence: Synthetic chimeric antigen receptor

SEQ ID NO: 4923 - protein, 491 aa, synthetic construct; identical to SEQ ID NO: 1398
  REGION 1..491: note = Description of Artificial Sequence: Synthetic chimeric antigen receptor

SEQ ID NO: 4924 - protein, 491 aa, synthetic construct; identical to SEQ ID NO: 1399
  REGION 1..491: note = Description of Artificial Sequence: Synthetic chimeric antigen receptor

SEQ ID NO: 4925 - protein, 491 aa, synthetic construct; identical to SEQ ID NO: 1400
  REGION 1..491: note = Description of Artificial Sequence: Synthetic chimeric antigen receptor

SEQ ID NO: 4926 - protein, 491 aa, synthetic construct; identical to SEQ ID NO: 1401
  REGION 1..491: note = Description of Artificial Sequence: Synthetic chimeric antigen receptor

SEQ ID NO: 4927 - protein, 491 aa, synthetic construct; identical to SEQ ID NO: 1401
  REGION 1..491: note = Description of Artificial Sequence: Synthetic chimeric antigen receptor

SEQ ID NO: 4928 - protein, 491 aa, synthetic construct; identical to SEQ ID NO: 1403
  REGION 1..491: note = Description of Artificial Sequence: Synthetic chimeric antigen receptor

SEQ ID NO: 4929 - protein, 486 aa, synthetic construct; identical to SEQ ID NO: 1404
  REGION 1..486: note = Description of Artificial Sequence: Synthetic chimeric antigen receptor

SEQ ID NO: 4930 - protein, 465 aa, synthetic construct; identical to SEQ ID NO: 1420
  REGION 1..465: note = Description of Artificial Sequence: Synthetic chimeric antigen receptor

SEQ ID NO: 4931 - protein, 681 aa, synthetic construct; identical to SEQ ID NO: 1421
  REGION 1..681: note = Description of Artificial Sequence: Synthetic chimeric antigen receptor

SEQ ID NO: 4932 - protein, 838 aa, synthetic construct; identical to SEQ ID NO: 1422
  REGION 1..838: note = Description of Artificial Sequence: Synthetic chimeric antigen receptor

SEQ ID NO: 4933 - protein, 1055 aa, synthetic construct [sequence omitted]

SEQ ID NO: 4934 - protein, 945 aa, synthetic construct; identical to SEQ ID NO: 1424
  REGION 1..945: note = Description of Artificial Sequence: Synthetic chimeric antigen receptor

SEQ ID NO: 4935 - protein, 845 aa, synthetic construct; identical to SEQ ID NO: 1425
  REGION 1..845: note = Description of Artificial Sequence: Synthetic chimeric antigen receptor

SEQ ID NO: 4936 - protein, 952 aa, synthetic construct; identical to SEQ ID NO: 1426
  REGION 1..952: note = Description of Artificial Sequence: Synthetic chimeric antigen receptor

SEQ ID NO: 4937 - protein, 1062 aa, synthetic construct; identical to SEQ ID NO: 1427
  REGION 1..1062: note = Description of Artificial Sequence: Synthetic chimeric antigen receptor

SEQ ID NO: 4938 - protein, 502 aa, synthetic construct; identical to SEQ ID NO: 1428
  REGION 1..502: note = Description of Artificial Sequence: Synthetic chimeric antigen receptor

SEQ ID NO: 4939 - protein, 508 aa, synthetic construct; identical to SEQ ID NO: 1429
  REGION 1..508: note = Description of Artificial Sequence: Synthetic chimeric antigen receptor

SEQ ID NO: 4940 - protein, 509 aa, synthetic construct; identical to SEQ ID NO: 1430
  REGION 1..509: note = Description of Artificial Sequence: Synthetic chimeric antigen receptor

SEQ ID NO: 4941 - protein, 550 aa, synthetic construct; identical to SEQ ID NO: 1431
  REGION 1..550: note = Description of Artificial Sequence: Synthetic chimeric antigen receptor

SEQ ID NO: 4942 - protein, 556 aa, synthetic construct; identical to SEQ ID NO: 1432
  REGION 1..556: note = Description of Artificial Sequence: Synthetic chimeric antigen receptor

SEQ ID NO: 4943 - protein, 506 aa, synthetic construct; identical to SEQ ID NO: 1433
  REGION 1..506: note = Description of Artificial Sequence: Synthetic chimeric antigen receptor

SEQ ID NO: 4944 - protein, 560 aa, synthetic construct; identical to SEQ ID NO: 1434
  REGION 1..560: note = Description of Artificial Sequence: Synthetic chimeric antigen receptor

SEQ ID NO: 4945 - protein, 513 aa, synthetic construct; identical to SEQ ID NO: 1435
  REGION 1..513: note = Description of Artificial Sequence: Synthetic chimeric antigen receptor

SEQ ID NO: 4946 - protein, 554 aa, synthetic construct; identical to SEQ ID NO: 1436
  REGION 1..554: note = Description of Artificial Sequence: Synthetic chimeric antigen receptor

SEQ ID NO: 4947 - protein, 476 aa, synthetic construct; identical to SEQ ID NO: 1437
  REGION 1..476: note = Description of Artificial Sequence: Synthetic chimeric antigen receptor

SEQ ID NO: 4948 - protein, 480 aa, synthetic construct; identical to SEQ ID NO: 1438
  REGION 1..480: note = Description of Artificial Sequence: Synthetic chimeric antigen receptor

SEQ ID NO: 4949 - protein, 428 aa, synthetic construct; identical to SEQ ID NO: 1439
  REGION 1..428: note = Description of Artificial Sequence: Synthetic chimeric antigen receptor

SEQ ID NO: 4950 - protein, 432 aa, synthetic construct; identical to SEQ ID NO: 1440
  REGION 1..432: note = Description of Artificial Sequence: Synthetic chimeric antigen receptor

SEQ ID NO: 4951 - protein, 486 aa, synthetic construct; identical to SEQ ID NO: 1393
  REGION 1..486: note = Description of Artificial Sequence: Synthetic chimeric antigen receptor

SEQ ID NO: 4952 - protein, 486 aa, synthetic construct; identical to SEQ ID NO: 1394
  REGION 1..486: note = Description of Artificial Sequence: Synthetic chimeric antigen receptor

SEQ ID NO: 4953 - protein, 486 aa, synthetic construct; identical to SEQ ID NO: 1395
  REGION 1..486: note = Description of Artificial Sequence: Synthetic chimeric antigen receptor

SEQ ID NO: 4954 - protein, 486 aa, synthetic construct; identical to SEQ ID NO: 1396
  REGION 1..486: note = Description of Artificial Sequence: Synthetic chimeric antigen receptor

SEQ ID NO: 4955 - protein, 491 aa, synthetic construct; identical to SEQ ID NO: 1397
  REGION 1..491: note = Description of Artificial Sequence: Synthetic chimeric antigen receptor

SEQ ID NO: 4956 - protein, 491 aa, synthetic construct; identical to SEQ ID NO: 1398
  REGION 1..491: note = Description of Artificial Sequence: Synthetic chimeric antigen receptor

SEQ ID NO: 4957 - protein, 491 aa, synthetic construct; identical to SEQ ID NO: 1399
  REGION 1..491: note = Description of Artificial Sequence: Synthetic chimeric antigen receptor

SEQ ID NO: 4958 - protein, 491 aa, synthetic construct; identical to SEQ ID NO: 1400
  REGION 1..491: note = Description of Artificial Sequence: Synthetic chimeric antigen receptor

SEQ ID NO: 4959 - protein, 491 aa, synthetic construct; identical to SEQ ID NO: 1401
  REGION 1..491: note = Description of Artificial Sequence: Synthetic chimeric antigen receptor

SEQ ID NO: 4960 - protein, 491 aa, synthetic construct; identical to SEQ ID NO: 1401
  REGION 1..491: note = Description of Artificial Sequence: Synthetic chimeric antigen receptor

SEQ ID NO: 4961 - protein, 491 aa, synthetic construct; identical to SEQ ID NO: 1403
  REGION 1..491: note = Description of Artificial Sequence: Synthetic chimeric antigen receptor

SEQ ID NO: 4962 - protein, 486 aa, synthetic construct; identical to SEQ ID NO: 1404
  REGION 1..486: note = Description of Artificial Sequence: Synthetic chimeric antigen receptor

SEQ ID NO: 4963 - protein, 486 aa, synthetic construct; identical to SEQ ID NO: 669
  REGION 1..486: note = Description of Artificial Sequence: Synthetic chimeric antigen receptor

SEQ ID NO: 4964 - protein, 486 aa, synthetic construct; identical to SEQ ID NO: 1393
  REGION 1..486: note = Description of Artificial Sequence: Synthetic chimeric antigen receptor

SEQ ID NO: 4965 - protein, 486 aa, synthetic construct; identical to SEQ ID NO: 1394
  REGION 1..486: note = Description of Artificial Sequence: Synthetic chimeric antigen receptor

SEQ ID NO: 4966 - protein, 486 aa, synthetic construct; identical to SEQ ID NO: 1395
  REGION 1..486: note = Description of Artificial Sequence: Synthetic chimeric antigen receptor

SEQ ID NO: 4967 - protein, 486 aa, synthetic construct; identical to SEQ ID NO: 1396
  REGION 1..486: note = Description of Artificial Sequence: Synthetic chimeric antigen receptor

SEQ ID NO: 4968 - protein, 491 aa, synthetic construct; identical to SEQ ID NO: 1397
  REGION 1..491: note = Description of Artificial Sequence: Synthetic chimeric antigen receptor

SEQ ID NO: 4969 - protein, 491 aa, synthetic construct; identical to SEQ ID NO: 1398
  REGION 1..491: note = Description of Artificial Sequence: Synthetic chimeric antigen receptor

SEQ ID NO: 4970 - protein, 491 aa, synthetic construct; identical to SEQ ID NO: 1399
  REGION 1..491: note = Description of Artificial Sequence: Synthetic chimeric antigen receptor

SEQ ID NO: 4971 - protein, 491 aa, synthetic construct; identical to SEQ ID NO: 1400
  REGION 1..491: note = Description of Artificial Sequence: Synthetic chimeric antigen receptor

SEQ ID NO: 4972 - protein, 491 aa, synthetic construct; identical to SEQ ID NO: 1401
  REGION 1..491: note = Description of Artificial Sequence: Synthetic chimeric antigen receptor

SEQ ID NO: 4973 - protein, 491 aa, synthetic construct; identical to SEQ ID NO: 1401
  REGION 1..491: note = Description of Artificial Sequence: Synthetic chimeric antigen receptor

SEQ ID NO: 4974 - protein, 491 aa, synthetic construct; identical to SEQ ID NO: 1403
  REGION 1..491: note = Description of Artificial Sequence: Synthetic chimeric antigen receptor

SEQ ID NO: 4975 - protein, 486 aa, synthetic construct; identical to SEQ ID NO: 1404
  REGION 1..486: note = Description of Artificial Sequence: Synthetic chimeric antigen receptor

SEQ ID NO: 4976 - protein, 527 aa, synthetic construct; identical to SEQ ID NO: 1466
  REGION 1..527: note = Description of Artificial Sequence: Synthetic chimeric antigen receptor

SEQ ID NO: 4977 - protein, 527 aa, synthetic construct; identical to SEQ ID NO: 1467
  REGION 1..527: note = Description of Artificial Sequence: Synthetic chimeric antigen receptor

SEQ ID NO: 4978 - protein, 222 aa, synthetic construct; identical to SEQ ID NO: 454
  REGION 1..222: note = Description of Artificial Sequence: Synthetic chimeric antigen receptor

SEQ ID NO: 4979 - protein, 226 aa, synthetic construct; identical to SEQ ID NO: 559
  REGION 1..226: note = Description of Artificial Sequence: Synthetic chimeric antigen receptor

SEQ ID NO: 4980 - protein, 286 aa, synthetic construct; identical to SEQ ID NO: 558
  REGION 1..286: note = Description of Artificial Sequence: Synthetic chimeric antigen receptor

SEQ ID NO: 4981 - protein, 726 aa, synthetic construct; identical to SEQ ID NO: 1471
  REGION 1..726: note = Description of Artificial Sequence: Synthetic chimeric antigen receptor

SEQ ID NO: 4982 - protein, 490 aa, synthetic construct; identical to SEQ ID NO: 1472
  REGION 1..490: note = Description of Artificial Sequence: Synthetic chimeric antigen receptor

SEQ ID NO: 4983 - protein, 730 aa, synthetic construct; identical to SEQ ID NO: 1473
  REGION 1..730: note = Description of Artificial Sequence: Synthetic chimeric antigen receptor

SEQ ID NO: 4984 - protein, 494 aa, synthetic construct; identical to SEQ ID NO: 1474
  REGION 1..494: note = Description of Artificial Sequence: Synthetic chimeric antigen receptor

SEQ ID NO: 4985 - protein, 790 aa, synthetic construct; identical to SEQ ID NO: 1475
  REGION 1..790: note = Description of Artificial Sequence: Synthetic chimeric antigen receptor

SEQ ID NO: 4986 - protein, 554 aa, synthetic construct; identical to SEQ ID NO: 1476
  REGION 1..554: note = Description of Artificial Sequence: Synthetic chimeric antigen receptor

SEQ ID NO: 4987 - protein, 728 aa, synthetic construct; identical to SEQ ID NO: 1477
  REGION 1..728: note = Description of Artificial Sequence: Synthetic chimeric antigen receptor

SEQ ID NO: 4988 - protein, 491 aa, synthetic construct; identical to SEQ ID NO: 1478
  REGION 1..491: note = Description of Artificial Sequence: Synthetic chimeric antigen receptor

SEQ ID NO: 4989 - protein, 732 aa, synthetic construct; identical to SEQ ID NO: 1479
  REGION 1..732: note = Description of Artificial Sequence: Synthetic chimeric antigen receptor

SEQ ID NO: 4990 - protein, 495 aa, synthetic construct; identical to SEQ ID NO: 1480
  REGION 1..495: note = Description of Artificial Sequence: Synthetic chimeric antigen receptor

SEQ ID NO: 4991 - protein, 792 aa, synthetic construct; identical to SEQ ID NO: 1481
  REGION 1..792: note = Description of Artificial Sequence: Synthetic chimeric antigen receptor

SEQ ID NO: 4992 - protein, 555 aa, synthetic construct; identical to SEQ ID NO: 1482
  REGION 1..555: note = Description of Artificial Sequence: Synthetic chimeric antigen receptor

SEQ ID NO: 4993 - protein, 725 aa, synthetic construct; identical to SEQ ID NO: 1483
  REGION 1..725: note = Description of Artificial Sequence: Synthetic chimeric antigen receptor

SEQ ID NO: 4994 - protein, 489 aa, synthetic construct; identical to SEQ ID NO: 1484
  REGION 1..489: note = Description of Artificial Sequence: Synthetic chimeric antigen receptor

SEQ ID NO: 4995 - protein, 729 aa, synthetic construct; identical to SEQ ID NO: 1485
  REGION 1..729: note = Description of Artificial Sequence: Synthetic chimeric antigen receptor

SEQ ID NO: 4996 - protein, 493 aa, synthetic construct; identical to SEQ ID NO: 1486
  REGION 1..493: note = Description of Artificial Sequence: Synthetic chimeric antigen receptor

SEQ ID NO: 4997 - protein, 789 aa, synthetic construct [sequence omitted]

SEQ ID NO: 4998 - protein, 553 aa, synthetic construct; identical to SEQ ID NO: 1488
  REGION 1..553: note = Description of Artificial Sequence: Synthetic chimeric antigen receptor

SEQ ID NO: 4999 - protein, 724 aa, synthetic construct; identical to SEQ ID NO: 1489
  REGION 1..724: note = Description of Artificial Sequence: Synthetic chimeric antigen receptor

SEQ ID NO: 5000 - protein, 487 aa, synthetic construct; identical to SEQ ID NO: 1490
  REGION 1..487: note = Description of Artificial Sequence: Synthetic chimeric antigen receptor

SEQ ID NO: 5001 - protein, 728 aa, synthetic construct; identical to SEQ ID NO: 1491
  REGION 1..728: note = Description of Artificial Sequence: Synthetic chimeric antigen receptor

SEQ ID NO: 5002 - protein, 491 aa, synthetic construct; identical to SEQ ID NO: 1492
  REGION 1..491: note = Description of Artificial Sequence: Synthetic chimeric antigen receptor

SEQ ID NO: 5003 - protein, 788 aa, synthetic construct; identical to SEQ ID NO: 1493
  REGION 1..788: note = Description of Artificial Sequence: Synthetic chimeric antigen receptor

SEQ ID NO: 5004 - protein, 551 aa, synthetic construct; identical to SEQ ID NO: 1494
  REGION 1..551: note = Description of Artificial Sequence: Synthetic chimeric antigen receptor

SEQ ID NO: 5005 - protein, 728 aa, synthetic construct; identical to SEQ ID NO: 1495
  REGION 1..728: note = Description of Artificial Sequence: Synthetic chimeric antigen receptor

SEQ ID NO: 5006 - protein, 492 aa, synthetic construct; identical to SEQ ID NO: 1496
  REGION 1..492: note = Description of Artificial Sequence: Synthetic chimeric antigen receptor

SEQ ID NO: 5007 - protein, 732 aa, synthetic construct [sequence omitted]

SEQ ID NO: 5008 - protein, 496 aa, synthetic construct; identical to SEQ ID NO: 1498
  REGION 1..496: note = Description of Artificial Sequence: Synthetic chimeric antigen receptor

SEQ ID NO: 5009 - protein, 792 aa, synthetic construct; identical to SEQ ID NO: 1499
  REGION 1..792: note = Description of Artificial Sequence: Synthetic chimeric antigen receptor

SEQ ID NO: 5010 - protein, 556 aa, synthetic construct; identical to SEQ ID NO: 1500
  REGION 1..556: note = Description of Artificial Sequence: Synthetic chimeric antigen receptor

SEQ ID NO: 5011 - protein, 728 aa, synthetic construct; identical to SEQ ID NO: 1501
  REGION 1..728: note = Description of Artificial Sequence: Synthetic chimeric antigen receptor

SEQ ID NO: 5012 - protein, 491 aa, synthetic construct; identical to SEQ ID NO: 1502
  REGION 1..491: note = Description of Artificial Sequence: Synthetic chimeric antigen receptor

SEQ ID NO: 5013 - protein, 732 aa, synthetic construct; identical to SEQ ID NO: 1503
  REGION 1..732: note = Description of Artificial Sequence: Synthetic chimeric antigen receptor

SEQ ID NO: 5014 - protein, 495 aa, synthetic construct; identical to SEQ ID NO: 1504
  REGION 1..495: note = Description of Artificial Sequence: Synthetic chimeric antigen receptor

SEQ ID NO: 5015 - protein, 792 aa, synthetic construct; identical to SEQ ID NO: 1505
  REGION 1..792: note = Description of Artificial Sequence: Synthetic chimeric antigen receptor

SEQ ID NO: 5016 - protein, 555 aa, synthetic construct; identical to SEQ ID NO: 1506
  REGION 1..555: note = Description of Artificial Sequence: Synthetic chimeric antigen receptor

SEQ ID NO: 5017 - protein, 726 aa, synthetic construct; identical to SEQ ID NO: 1507
  REGION 1..726: note = Description of Artificial Sequence: Synthetic chimeric antigen receptor

SEQ ID NO: 5018 - protein, 490 aa, synthetic construct; identical to SEQ ID NO: 1508
  REGION 1..490: note = Description of Artificial Sequence: Synthetic chimeric antigen receptor

SEQ ID NO: 5019 - protein, 730 aa, synthetic construct; identical to SEQ ID NO: 1509
  REGION 1..730: note = Description of Artificial Sequence: Synthetic chimeric antigen receptor

SEQ ID NO: 5020 - protein, 494 aa, synthetic construct; identical to SEQ ID NO: 1510
  REGION 1..494: note = Description of Artificial Sequence: Synthetic chimeric antigen receptor

SEQ ID NO: 5021 - protein, 790 aa, synthetic construct; identical to SEQ ID NO: 1511
  REGION 1..790: note = Description of Artificial Sequence: Synthetic chimeric antigen receptor

SEQ ID NO: 5022 - protein, 554 aa, synthetic construct; identical to SEQ ID NO: 1512
  REGION 1..554: note = Description of Artificial Sequence: Synthetic chimeric antigen receptor

SEQ ID NO: 5023 - protein, 724 aa, synthetic construct; identical to SEQ ID NO: 1513
  REGION 1..724: note = Description of Artificial Sequence: Synthetic chimeric antigen receptor

SEQ ID NO: 5024 - protein, 487 aa, synthetic construct; identical to SEQ ID NO: 1514
  REGION 1..487: note = Description of Artificial Sequence: Synthetic chimeric antigen receptor

SEQ ID NO: 5025 - protein, 728 aa, synthetic construct; identical to SEQ ID NO: 1515
  REGION 1..728: note = Description of Artificial Sequence: Synthetic chimeric antigen receptor

SEQ ID NO: 5026 - protein, 491 aa, synthetic construct; identical to SEQ ID NO: 1516
  REGION 1..491: note = Description of Artificial Sequence: Synthetic chimeric antigen receptor

SEQ ID NO: 5027 - protein, 788 aa, synthetic construct [sequence omitted]

SEQ ID NO: 5028 - protein, 551 aa, synthetic construct; identical to SEQ ID NO: 1518
  REGION 1..551: note = Description of Artificial Sequence: Synthetic chimeric antigen receptor

SEQ ID NO: 5029 - protein, 484 aa, synthetic construct; identical to SEQ ID NO: 1519
  REGION 1..484: note = Description of Artificial Sequence: Synthetic chimeric antigen receptor

SEQ ID NO: 5030 - protein, 480 aa, synthetic construct; identical to SEQ ID NO: 1520
  REGION 1..480: note = Description of Artificial Sequence: Synthetic chimeric antigen receptor

SEQ ID NO: 5031 - protein, 544 aa, synthetic construct; identical to SEQ ID NO: 1521
  REGION 1..544: note = Description of Artificial Sequence: Synthetic chimeric antigen receptor

SEQ ID NO: 5032 - protein, 727 aa, synthetic construct; identical to SEQ ID NO: 1522
  REGION 1..727: note = Description of Artificial Sequence: Synthetic chimeric antigen receptor

SEQ ID NO: 5033 - protein, 792 aa, synthetic construct; identical to SEQ ID NO: 1523
  REGION 1..792: note = Description of Artificial Sequence: Synthetic chimeric antigen receptor

SEQ ID NO: 5034 - protein, 506 aa, synthetic construct; identical to SEQ ID NO: 1524
  REGION 1..506: note = Description of Artificial Sequence: Synthetic chimeric antigen receptor

SEQ ID NO: 5035 - protein, 571 aa, synthetic construct; identical to SEQ ID NO: 1525
  REGION 1..571: note = Description of Artificial Sequence: Synthetic chimeric antigen receptor

SEQ ID NO: 5036 - protein, 727 aa, synthetic construct; identical to SEQ ID NO: 1526
  REGION 1..727: note = Description of Artificial Sequence: Synthetic chimeric antigen receptor

SEQ ID NO: 5037 - protein, 792 aa, synthetic construct [sequence omitted]

SEQ ID NO: 5038 - protein, 511 aa, synthetic construct; identical to SEQ ID NO: 1528
  REGION 1..511: note = Description of Artificial Sequence: Synthetic chimeric antigen receptor

SEQ ID NO: 5039 - protein, 703 aa, synthetic construct; identical to SEQ ID NO: 1529
  REGION 1..703: note = Description of Artificial Sequence: Synthetic chimeric antigen receptor

SEQ ID NO: 5040 - protein, 714 aa, synthetic construct; identical to SEQ ID NO: 1530
  REGION 1..714: note = Description of Artificial Sequence: Synthetic chimeric antigen receptor

SEQ ID NO: 5041 - protein, 701 aa, synthetic construct; identical to SEQ ID NO: 1531
  REGION 1..701: note = Description of Artificial Sequence: Synthetic chimeric antigen receptor

SEQ ID NO: 5042 - protein, 466 aa, synthetic construct; identical to SEQ ID NO: 1532
  REGION 1..466: note = Description of Artificial Sequence: Synthetic chimeric antigen receptor

SEQ ID NO: 5043 - protein, 470 aa, synthetic construct; identical to SEQ ID NO: 1533
  REGION 1..470: note = Description of Artificial Sequence: Synthetic chimeric antigen receptor

SEQ ID NO: 5044 - protein, 530 aa, synthetic construct; identical to SEQ ID NO: 1534
  REGION 1..530: note = Description of Artificial Sequence: Synthetic chimeric antigen receptor

SEQ ID NO: 5045 - protein, 470 aa, synthetic construct; identical to SEQ ID NO: 1535
  REGION 1..470: note = Description of Artificial Sequence: Synthetic chimeric antigen receptor

SEQ ID NO: 5046 - protein, 474 aa, synthetic construct; identical to SEQ ID NO: 1536
  REGION 1..474: note = Description of Artificial Sequence: Synthetic chimeric antigen receptor

SEQ ID NO: 5047 - protein, 534 aa, synthetic construct; identical to SEQ ID NO: 1537
  REGION 1..534: note = Description of Artificial Sequence: Synthetic chimeric antigen receptor

SEQ ID NO: 5048 - protein, 464 aa, synthetic construct; identical to SEQ ID NO: 1538
  REGION 1..464: note = Description of Artificial Sequence: Synthetic chimeric antigen receptor

SEQ ID NO: 5049 - protein, 468 aa, synthetic construct; identical to SEQ ID NO: 1539
  REGION 1..468: note = Description of Artificial Sequence: Synthetic chimeric antigen receptor

SEQ ID NO: 5050 - protein, 528 aa, synthetic construct; identical to SEQ ID NO: 1540
  REGION 1..528: note = Description of Artificial Sequence: Synthetic chimeric antigen receptor

SEQ ID NO: 5051 - protein, 223 aa, synthetic construct; identical to SEQ ID NO: 1541
  REGION 1..223: note = Description of Artificial Sequence: Synthetic chimeric antigen receptor

SEQ ID NO: 5052 - protein, 496 aa, synthetic construct; identical to SEQ ID NO: 1542
  REGION 1..496: note = Description of Artificial Sequence: Synthetic chimeric antigen receptor

SEQ ID NO: 5053 - DNA, 726 bp, synthetic construct; identical to SEQ ID NO: 420
  misc_feature 1..726: note = Description of Artificial Sequence: Synthetic CD19 scFv sequence
  source 1..726: mol_type = other DNA

SEQ ID NO: 5054 - DNA, 726 bp, synthetic construct; identical to SEQ ID NO: 1295
  misc_feature 1..726: note = Description of Artificial Sequence: Synthetic CD19 scFv sequence
  source 1..726: mol_type = other DNA

SEQ ID NO: 5055 - DNA, 726 bp, synthetic construct; identical to SEQ ID NO: 1296
  misc_feature 1..726: note = Description of Artificial Sequence: Synthetic CD19 scFv sequence
  source 1..726: mol_type = other DNA

SEQ ID NO: 5056 - DNA, 726 bp, synthetic construct; identical to SEQ ID NO: 1297
  misc_feature 1..726: note = Description of Artificial Sequence: Synthetic CD19 scFv sequence
  source 1..726: mol_type = other DNA

SEQ ID NO: 5057 - DNA, 726 bp, synthetic construct; identical to SEQ ID NO: 1298
  misc_feature 1..726: note = Description of Artificial Sequence: Synthetic CD19 scFv sequence
  source 1..726: mol_type = other DNA

SEQ ID NO: 5058 - DNA, 726 bp, synthetic construct; identical to SEQ ID NO: 1299
  misc_feature 1..726: note = Description of Artificial Sequence: Synthetic CD19 scFv sequence
  source 1..726: mol_type = other DNA

SEQ ID NO: 5059 - DNA, 207 bp, synthetic construct; identical to SEQ ID NO: 1549
  misc_feature 1..207: note = Description of Artificial Sequence: Synthetic Construct
  source 1..207: mol_type = other DNA

SEQ ID NO: 5060 - DNA, 207 bp, Homo sapiens; identical to SEQ ID NO: 1301
  source 1..207: mol_type = other DNA

SEQ ID NO: 5061 - DNA, 207 bp, synthetic construct; identical to SEQ ID NO: 1551
  misc_feature 1..207: note = Description of Artificial Sequence: Synthetic Construct
  source 1..207: mol_type = other DNA

SEQ ID NO: 5062 - DNA, 207 bp, synthetic construct; identical to SEQ ID NO: 1552
  misc_feature 1..207: note = Description of Artificial Sequence: Synthetic Construct
  source 1..207: mol_type = other DNA

SEQ ID NO: 5063 - DNA, 207 bp, synthetic construct; identical to SEQ ID NO: 1553
  misc_feature 1..207: note = Description of Artificial Sequence: Synthetic Construct
  source 1..207: mol_type = other DNA

SEQ ID NO: 5064 - DNA, 135 bp, synthetic construct; identical to SEQ ID NO: 1303
  misc_feature 1..135: note = Description of Artificial Sequence: Synthetic Construct
  source 1..135: mol_type = other DNA

SEQ ID NO: 5065 - DNA, 135 bp, synthetic construct; identical to SEQ ID NO: 1304
  misc_feature 1..135: note = Description of Artificial Sequence: Synthetic Construct
  source 1..135: mol_type = other DNA

SEQ ID NO: 5066 - DNA, 135 bp, synthetic construct; identical to SEQ ID NO: 1305
  misc_feature 1..135: note = Description of Artificial Sequence: Synthetic Construct
  source 1..135: mol_type = other DNA

SEQ ID NO: 5067 - DNA, 135 bp, synthetic construct; identical to SEQ ID NO: 1306
  misc_feature 1..135: note = Description of Artificial Sequence: Synthetic Construct
  source 1..135: mol_type = other DNA

SEQ ID NO: 5068 - DNA, 135 bp, synthetic construct; identical to SEQ ID NO: 1307
  misc_feature 1..135: note = Description of Artificial Sequence: Synthetic Construct
  source 1..135: mol_type = other DNA

SEQ ID NO: 5069 - DNA, 336 bp, synthetic construct; identical to SEQ ID NO: 1559
  misc_feature 1..336: note = Description of Artificial Sequence: Synthetic Construct
  source 1..336: mol_type = other DNA

SEQ ID NO: 5070 - DNA, 336 bp, synthetic construct; identical to SEQ ID NO: 1560
  misc_feature 1..336: note = Description of Artificial Sequence: Synthetic Construct
  source 1..336: mol_type = other DNA

SEQ ID NO: 5071 - DNA, 336 bp, synthetic construct; identical to SEQ ID NO: 1561
  misc_feature 1..336: note = Description of Artificial Sequence: Synthetic Construct
  source 1..336: mol_type = other DNA

SEQ ID NO: 5072 - DNA, 336 bp, synthetic construct; identical to SEQ ID NO: 1562
  misc_feature 1..336: note = Description of Artificial Sequence: Synthetic Construct
  source 1..336: mol_type = other DNA

SEQ ID NO: 5073 - DNA, 336 bp, synthetic construct; identical to SEQ ID NO: 1563
  misc_feature 1..336: note = Description of Artificial Sequence: Synthetic Construct
  source 1..336: mol_type = other DNA

SEQ ID NO: 5074 - DNA, 336 bp, synthetic construct; identical to SEQ ID NO: 1564
  misc_feature 1..336: note = Description of Artificial Sequence: Synthetic Construct
  source 1..336: mol_type = other DNA

SEQ ID NO: 5075 - DNA, 126 bp, synthetic construct; identical to SEQ ID NO: 1315
  misc_feature 1..126: note = Description of Artificial Sequence: Synthetic Construct
  source 1..126: mol_type = other DNA

SEQ ID NO: 5076 - DNA, 126 bp, synthetic construct; identical to SEQ ID NO: 1316
  misc_feature 1..126: note = Description of Artificial Sequence: Synthetic Construct
  source 1..126: mol_type = other DNA

SEQ ID NO: 5077 - DNA, 126 bp, synthetic construct; identical to SEQ ID NO: 1317
  misc_feature 1..126: note = Description of Artificial Sequence: Synthetic Construct
  source 1..126: mol_type = other DNA

SEQ ID NO: 5078 - DNA, 126 bp, synthetic construct; identical to SEQ ID NO: 1318
  misc_feature 1..126: note = Description of Artificial Sequence: Synthetic Construct
  source 1..126: mol_type = other DNA

SEQ ID NO: 5079 - DNA, 126 bp, synthetic construct; identical to SEQ ID NO: 1319
  misc_feature 1..126: note = Description of Artificial Sequence: Synthetic Construct
  source 1..126: mol_type = other DNA

SEQ ID NO: 5080 - DNA, 126 bp, synthetic construct; identical to SEQ ID NO: 1570
  misc_feature 1..126: note = Description of Artificial Sequence: Synthetic Construct
  source 1..126: mol_type = other DNA

SEQ ID NO: 5081 - DNA, 72 bp, synthetic construct; identical to SEQ ID NO: 1571
  misc_feature 1..72: note = Description of Artificial Sequence: Synthetic Construct
  source 1..72: mol_type = other DNA

SEQ ID NO: 5082 - DNA, 72 bp, synthetic construct; identical to SEQ ID NO: 1572
  misc_feature 1..72: note = Description of Artificial Sequence: Synthetic Construct
  source 1..72: mol_type = other DNA

SEQ ID NO: 5083 - DNA, 63 bp, Homo sapiens; identical to SEQ ID NO: 1321
  source 1..63: mol_type = other DNA

SEQ ID NO: 5084 - DNA, 63 bp, synthetic construct; identical to SEQ ID NO: 1322
  misc_feature 1..63: note = Description of Artificial Sequence: Synthetic signal sequence
  source 1..63: mol_type = other DNA

SEQ ID NO: 5085 - DNA, 63 bp, synthetic construct; identical to SEQ ID NO: 1323
  misc_feature 1..63: note = Description of Artificial Sequence: Synthetic signal sequence
  source 1..63: mol_type = other DNA

SEQ ID NO: 5086 - DNA, 63 bp, synthetic construct; identical to SEQ ID NO: 1324
  misc_feature 1..63: note = Description of Artificial Sequence: Synthetic signal sequence
  source 1..63: mol_type = other DNA

SEQ ID NO: 5087 - DNA, 63 bp, synthetic construct; identical to SEQ ID NO: 1325
  misc_feature 1..63: note = Description of Artificial Sequence: Synthetic signal sequence
  source 1..63: mol_type = other DNA

SEQ ID NO: 5088 - DNA, 66 bp, Homo sapiens; identical to SEQ ID NO: 1580
  source 1..66: mol_type = other DNA

SEQ ID NO: 5089 - DNA, 66 bp, synthetic construct; identical to SEQ ID NO: 1581
  misc_feature 1..66: note = Description of Artificial Sequence: Synthetic signal sequence
  source 1..66: mol_type = other DNA

SEQ ID NO: 5090 - DNA, 66 bp, synthetic construct; identical to SEQ ID NO: 1582
  misc_feature 1..66: note = Description of Artificial Sequence: Synthetic signal sequence
  source 1..66: mol_type = other DNA

SEQ ID NO: 5091 - DNA, 66 bp, synthetic construct; identical to SEQ ID NO: 1583
  misc_feature 1..66: note = Description of Artificial Sequence: Synthetic signal sequence
  source 1..66: mol_type = other DNA

SEQ ID NO: 5092 - DNA, 66 bp, synthetic construct; identical to SEQ ID NO: 1584
  misc_feature 1..66: note = Description of Artificial Sequence: Synthetic signal sequence
  source 1..66: mol_type = other DNA

SEQ ID NO: 5093 - DNA, 66 bp, synthetic construct; identical to SEQ ID NO: 1585
  misc_feature 1..66: note = Description of Artificial Sequence: Synthetic signal sequence
  source 1..66: mol_type = other DNA

SEQ ID NO: 5094 - DNA, 66 bp, synthetic construct; identical to SEQ ID NO: 1586
  misc_feature 1..66: note = Description of Artificial Sequence: Synthetic signal sequence
  source 1..66: mol_type = other DNA

SEQ ID NO: 5095 - DNA, 66 bp, synthetic construct; identical to SEQ ID NO: 1587
  misc_feature 1..66: note = Description of Artificial Sequence: Synthetic signal sequence
  source 1..66: mol_type = other DNA

SEQ ID NO: 5096 - DNA, 66 bp, synthetic construct; identical to SEQ ID NO: 1588
  misc_feature 1..66: note = Description of Artificial Sequence: Synthetic signal sequence
  source 1..66: mol_type = other DNA

SEQ ID NO: 5097 - DNA, 918 bp, synthetic construct; identical to SEQ ID NO: 1590
  misc_feature 1..918: note = Description of Artificial Sequence: Synthetic payload
  source 1..918: mol_type = other DNA

SEQ ID NO: 5098 - DNA, 918 bp, synthetic construct; identical to SEQ ID NO: 1591
  misc_feature 1..918: note = Description of Artificial Sequence: Synthetic payload
  source 1..918: mol_type = other DNA

SEQ ID NO: 5099 - DNA, 918 bp, synthetic construct; identical to SEQ ID NO: 1591
  misc_feature 1..918: note = Description of Artificial Sequence: Synthetic payload
  source 1..918: mol_type = other DNA

SEQ ID NO: 5100 - DNA, 921 bp, synthetic construct; identical to SEQ ID NO: 1593
  misc_feature 1..921: note = Description of Artificial Sequence: Synthetic payload
  source 1..921: mol_type = other DNA

SEQ ID NO: 5101 - DNA, 918 bp, synthetic construct; identical to SEQ ID NO: 1594
  misc_feature 1..918: note = Description of Artificial Sequence: Synthetic payload
  source 1..918: mol_type = other DNA

SEQ ID NO: 5102 - DNA, 918 bp, synthetic construct; identical to SEQ ID NO: 1595
  misc_feature 1..918: note = Description of Artificial Sequence: Synthetic payload
  source 1..918: mol_type = other DNA

SEQ ID NO: 5103 - DNA, 918 bp, synthetic construct; identical to SEQ ID NO: 1596
  misc_feature 1..918: note = Description of Artificial Sequence: Synthetic payload
  source 1..918: mol_type = other DNA

SEQ ID NO: 5104 - DNA, 918 bp, synthetic construct; identical to SEQ ID NO: 1597
  misc_feature 1..918: note = Description of Artificial Sequence: Synthetic payload
  source 1..918: mol_type = other DNA

SEQ ID NO: 5105 - DNA, 918 bp, synthetic construct; identical to SEQ ID NO: 1590
  misc_feature 1..918: note = Description of Artificial Sequence: Synthetic payload
  source 1..918: mol_type = other DNA

SEQ ID NO: 5106 - DNA, 918 bp, synthetic construct; identical to SEQ ID NO: 1591
  misc_feature 1..918: note = Description of Artificial Sequence: Synthetic payload
  source 1..918: mol_type = other DNA

SEQ ID NO: 5107 - DNA, 918 bp, synthetic construct; identical to SEQ ID NO: 1600
  misc_feature 1..918: note = Description of Artificial Sequence: Synthetic payload
  source 1..918: mol_type = other DNA

SEQ ID NO: 5108 - DNA, 918 bp, synthetic construct; identical to SEQ ID NO: 1601
  misc_feature 1..918: note = Description of Artificial Sequence: Synthetic payload
  source 1..918: mol_type = other DNA

SEQ ID NO: 5109 - DNA, 918 bp, synthetic construct; identical to SEQ ID NO: 1602
  misc_feature 1..918: note = Description of Artificial Sequence: Synthetic payload
  source 1..918: mol_type = other DNA

SEQ ID NO: 5110 - DNA, 594 bp, synthetic construct; identical to SEQ ID NO: 1604
  misc_feature 1..594: note = Description of Artificial Sequence: Synthetic payload
  source 1..594: mol_type = other DNA

SEQ ID NO: 5111 - DNA, 594 bp, synthetic construct; identical to SEQ ID NO: 1605
  misc_feature 1..594: note = Description of Artificial Sequence: Synthetic payload
  source 1..594: mol_type = other DNA

SEQ ID NO: 5112 - DNA, 594 bp, synthetic construct; identical to SEQ ID NO: 1606
  misc_feature 1..594: note = Description of Artificial Sequence: Synthetic payload
  source 1..594: mol_type = other DNA

SEQ ID NO: 5113 - DNA, 594 bp, synthetic construct; identical to SEQ ID NO: 1607
  misc_feature 1..594: note = Description of Artificial Sequence: Synthetic payload
  source 1..594: mol_type = other DNA

SEQ ID NO: 5114 - DNA, 591 bp, synthetic construct; identical to SEQ ID NO: 1608
  misc_feature 1..591: note = Description of Artificial Sequence: Synthetic payload
  source 1..591: mol_type = other DNA

SEQ ID NO: 5115 - DNA, 591 bp, synthetic construct; identical to SEQ ID NO: 1609
  misc_feature 1..591: note = Description of Artificial Sequence: Synthetic payload
  source 1..591: mol_type = other DNA

SEQ ID NO: 5116 - DNA, 594 bp, synthetic construct; identical to SEQ ID NO: 1610
  misc_feature 1..594: note = Description of Artificial Sequence: Synthetic payload
  source 1..594: mol_type = other DNA

SEQ ID NO: 5117 - DNA, 597 bp, synthetic construct; identical to SEQ ID NO: 1611
  misc_feature 1..597: note = Description of Artificial Sequence: Synthetic payload
  source 1..597: mol_type = other DNA

SEQ ID NO: 5118 - DNA, 597 bp, synthetic construct; identical to SEQ ID NO: 1612
  misc_feature 1..597: note = Description of Artificial Sequence: Synthetic payload
  source 1..597: mol_type = other DNA

SEQ ID NO: 5119 - DNA, 591 bp, synthetic construct; identical to SEQ ID NO: 1613
  misc_feature 1..591: note = Description of Artificial Sequence: Synthetic payload
  source 1..591: mol_type = other DNA

SEQ ID NO: 5120 - DNA, 591 bp, synthetic construct; identical to SEQ ID NO: 1614
  misc_feature 1..591: note = Description of Artificial Sequence: Synthetic payload
  source 1..591: mol_type = other DNA

SEQ ID NO: 5121 - DNA, 345 bp, Homo sapiens; identical to SEQ ID NO: 168
  source 1..345: mol_type = other DNA

SEQ ID NO: 5122 - DNA, 345 bp, synthetic construct; identical to SEQ ID NO: 1617
  misc_feature 1..345: note = Description of Artificial Sequence: Synthetic payload
  source 1..345: mol_type = other DNA

SEQ ID NO: 5123 - DNA, 345 bp, synthetic construct; identical to SEQ ID NO: 1618
  misc_feature 1..345: note = Description of Artificial Sequence: Synthetic payload
  source 1..345: mol_type = other DNA

SEQ ID NO: 5124 - DNA, 342 bp, synthetic construct; identical to SEQ ID NO: 1619
  misc_feature 1..342: note = Description of Artificial Sequence: Synthetic payload
  source 1..342: mol_type = other DNA

SEQ ID NO: 5125 - DNA, 342 bp, synthetic construct; identical to SEQ ID NO: 1620
  misc_feature 1..342: note = Description of Artificial Sequence: Synthetic payload
  source 1..342: mol_type = other DNA

SEQ ID NO: 5126 - DNA, 714 bp, Homo sapiens; identical to SEQ ID NO: 1622
  source 1..714: mol_type = other DNA

SEQ ID NO: 5127 - DNA, 711 bp, synthetic construct; identical to SEQ ID NO: 1623
  misc_feature 1..711: note = Description of Artificial Sequence: Synthetic Construct
  source 1..711: mol_type = other DNA

SEQ ID NO: 5128 - DNA, 711 bp, synthetic construct; identical to SEQ ID NO: 1624
  misc_feature 1..711: note = Description of Artificial Sequence: Synthetic payload
  source 1..711: mol_type = other DNA

SEQ ID NO: 5129 - DNA, 705 bp, synthetic construct; identical to SEQ ID NO: 1626
  misc_feature 1..705: note = Description of Artificial Sequence: Synthetic polynucleotide
  source 1..705: mol_type = other DNA

SEQ ID NO: 5130 - DNA, 576 bp, synthetic construct; identical to SEQ ID NO: 1627
  misc_feature 1..576: note = Description of Artificial Sequence: Synthetic Construct
  source 1..576: mol_type = other DNA

SEQ ID NO: 5131 - DNA, 15 bp, synthetic construct
  misc_feature 1..15: note = Description of Artificial Sequence: Synthetic linker sequence
  source 1..15: mol_type = other DNA
ggaggcagcggagga

SEQ ID NO: 5132 - DNA, 15 bp, synthetic construct
  misc_feature 1..15: note = Description of Artificial Sequence: Synthetic linker sequence
  source 1..15: mol_type = other DNA
ggaggctctggagga

SEQ ID NO: 5133 - DNA, 15 bp, synthetic construct
  misc_feature 1..15: note = Description of Artificial Sequence: Synthetic linker sequence
  source 1..15: mol_type = other DNA
ggaggctccggcgga

SEQ ID NO: 5134 - DNA, 15 bp, synthetic construct
  misc_feature 1..15: note = Description of Artificial Sequence: Synthetic linker sequence
  source 1..15: mol_type = other DNA
ggaggatccggaggc

SEQ ID NO: 5135 - DNA, 15 bp, synthetic construct
  misc_feature 1..15: note = Description of Artificial Sequence: Synthetic linker sequence
  source 1..15: mol_type = other DNA
ggaggatctggagga

SEQ ID NO: 5136 - DNA, 45 bp, synthetic construct; identical to SEQ ID NO: 1636
  misc_feature 1..45: note = Description of Artificial Sequence: Synthetic linker sequence
  source 1..45: mol_type = other DNA

SEQ ID NO: 5137 - DNA, 45 bp, synthetic construct; identical to SEQ ID NO: 1637
  misc_feature 1..45: note = Description of Artificial Sequence: Synthetic linker sequence
  source 1..45: mol_type = other DNA

SEQ ID NO: 5138 - DNA, 45 bp, synthetic construct; identical to SEQ ID NO: 1638
  misc_feature 1..45: note = Description of Artificial Sequence: Synthetic linker sequence
  source 1..45: mol_type = other DNA

SEQ ID NO: 5139 - DNA, 45 bp, synthetic construct; identical to SEQ ID NO: 1639
  misc_feature 1..45: note = Description of Artificial Sequence: Synthetic linker sequence
  source 1..45: mol_type = other DNA

SEQ ID NO: 5140 - DNA, 45 bp, synthetic construct; identical to SEQ ID NO: 1640
  misc_feature 1..45: note = Description of Artificial Sequence: Synthetic linker sequence
  source 1..45: mol_type = other DNA

SEQ ID NO: 5141 - DNA, 45 bp, synthetic construct; identical to SEQ ID NO: 1641
  misc_feature 1..45: note = Description of Artificial Sequence: Synthetic linker sequence
  source 1..45: mol_type = other DNA

SEQ ID NO: 5142 - DNA, 12 bp, synthetic construct
  misc_feature 1..12: note = Description of Artificial Sequence: Synthetic linker sequence
  source 1..12: mol_type = other DNA
ggaggatctgga

SEQ ID NO: 5143 - DNA, 66 bp, synthetic construct; identical to SEQ ID NO: 1645
  misc_feature 1..66: note = Description of Artificial Sequence: Synthetic linker sequence
  source 1..66: mol_type = other DNA

SEQ ID NO: 5144 - DNA, 78 bp, synthetic construct; identical to SEQ ID NO: 1647
  misc_feature 1..78: note = Description of Artificial Sequence: Synthetic linker sequence
  source 1..78: mol_type = other DNA

SEQ ID NO: 5145 - DNA, 78 bp, synthetic construct; identical to SEQ ID NO: 1648
  misc_feature 1..78: note = Description of Artificial Sequence: Synthetic linker sequence
  source 1..78: mol_type = other DNA

SEQ ID NO: 5146 - DNA, 78 bp, synthetic construct; identical to SEQ ID NO: 1649
  misc_feature 1..78: note = Description of Artificial Sequence: Synthetic linker sequence
  source 1..78: mol_type = other DNA

SEQ ID NO: 5147 - DNA, 78 bp, synthetic construct; identical to SEQ ID NO: 1650
  misc_feature 1..78: note = Description of Artificial Sequence: Synthetic linker sequence
  source 1..78: mol_type = other DNA

SEQ ID NO: 5148 - DNA, 78 bp, synthetic construct; identical to SEQ ID NO: 1651
  misc_feature 1..78: note = Description of Artificial Sequence: Synthetic linker sequence
  source 1..78: mol_type = other DNA

SEQ ID NO: 5149 - DNA, 78 bp, synthetic construct; identical to SEQ ID NO: 1652
  misc_feature 1..78: note = Description of Artificial Sequence: Synthetic linker sequence
  source 1..78: mol_type = other DNA

SEQ ID NO: 5150 - DNA, 78 bp, synthetic construct; identical to SEQ ID NO: 1650
  misc_feature 1..78: note = Description of Artificial Sequence: Synthetic linker sequence
  source 1..78: mol_type = other DNA

SEQ ID NO: 5151 - DNA, 36 bp, synthetic construct; identical to SEQ ID NO: 1337
  misc_feature 1..36: note = Description of Artificial Sequence: Synthetic cleavage site
  source 1..36: mol_type = other DNA

SEQ ID NO: 5152 - DNA, 36 bp, synthetic construct; identical to SEQ ID NO: 1338
  misc_feature 1..36: note = Description of Artificial Sequence: Synthetic cleavage site
  source 1..36: mol_type = other DNA

SEQ ID NO: 5153 - DNA, 36 bp, synthetic construct; identical to SEQ ID NO: 1339
  misc_feature 1..36: note = Description of Artificial Sequence: Synthetic cleavage site
  source 1..36: mol_type = other DNA

SEQ ID NO: 5154 - DNA, 27 bp, synthetic construct
  misc_feature 1..27: note = Description of Artificial Sequence: Synthetic HA Tag
  source 1..27: mol_type = other DNA
tacccatacgatgttccagattacgct

SEQ ID NO: 5155 - DNA, 27 bp, synthetic construct
  misc_feature 1..27: note = Description of Artificial Sequence: Synthetic HA Tag
  source 1..27: mol_type = other DNA
tatccttacgatgtgcccgactatgct

SEQ ID NO: 5156 - DNA, 27 bp, synthetic construct
  misc_feature 1..27: note = Description of Artificial Sequence: Synthetic HA Tag
  source 1..27: mol_type = other DNA
tatccgtacgacgtaccagactacgca

SEQ ID NO: 5157 - DNA, 321 bp, synthetic construct; identical to SEQ ID NO: 1664
  misc_feature 1..321: note = Description of Artificial Sequence: Synthetic destabilizing domain (DD)
  source 1..321: mol_type = other DNA

SEQ ID NO: 5158 - DNA, 321 bp, synthetic construct; identical to SEQ ID NO: 1665
  misc_feature 1..321: note = Description of Artificial Sequence: Synthetic destabilizing domain (DD)
  source 1..321: mol_type = other DNA

SEQ ID NO: 5159 - DNA, 321 bp, synthetic construct; identical to SEQ ID NO: 1666
  misc_feature 1..321: note = Description of Artificial Sequence: Synthetic destabilizing domain (DD)
  source 1..321: mol_type = other DNA

SEQ ID NO: 5160 - DNA, 321 bp, synthetic construct; identical to SEQ ID NO: 1667
  misc_feature 1..321: note = Description of Artificial Sequence: Synthetic destabilizing domain (DD)
  source 1..321: mol_type = other DNA

SEQ ID NO: 5161 - DNA, 321 bp, synthetic construct; identical to SEQ ID NO: 1668
  misc_feature 1..321: note = Description of Artificial Sequence: Synthetic destabilizing domain (DD)
  source 1..321: mol_type = other DNA

SEQ ID NO: 5162 - DNA, 324 bp, synthetic construct; identical to SEQ ID NO: 1669
  misc_feature 1..324: note = Description of Artificial Sequence: Synthetic destabilizing domain (DD)
  source 1..324: mol_type = other DNA

SEQ ID NO: 5163 - DNA, 324 bp, synthetic construct; identical to SEQ ID NO: 1670
  misc_feature 1..324: note = Description of Artificial Sequence: Synthetic destabilizing domain (DD)
  source 1..324: mol_type = other DNA

SEQ ID NO: 5164 - DNA, 324 bp, synthetic construct; identical to SEQ ID NO: 1671
  misc_feature 1..324: note = Description of Artificial Sequence: Synthetic destabilizing domain (DD)
  source 1..324: mol_type = other DNA

SEQ ID NO: 5165 - DNA, 324 bp, synthetic construct; identical to SEQ ID NO: 1672
  misc_feature 1..324: note = Description of Artificial Sequence: Synthetic destabilizing domain (DD)
  source 1..324: mol_type = other DNA

SEQ ID NO: 5166 - DNA, 321 bp, synthetic construct; identical to SEQ ID NO: 1673
  misc_feature 1..321: note = Description of Artificial Sequence: Synthetic destabilizing domain (DD)
  source 1..321: mol_type = other DNA

SEQ ID NO: 5167 - DNA, 321 bp, synthetic construct; identical to SEQ ID NO: 1674
  misc_feature 1..321: note = Description of Artificial Sequence: Synthetic destabilizing domain (DD)
  source 1..321: mol_type = other DNA

SEQ ID NO: 5168 - DNA, 474 bp, synthetic construct; identical to SEQ ID NO: 1676
  misc_feature 1..474: note = Description of Artificial Sequence: Synthetic destabilizing domain (DD)
  source 1..474: mol_type = other DNA

SEQ ID NO: 5169 - DNA, 477 bp, synthetic construct; identical to SEQ ID NO: 1677
  misc_feature 1..477: note = Description of Artificial Sequence: Synthetic destabilizing domain (DD)
  source 1..477: mol_type = other DNA

SEQ ID NO: 5170 - DNA, 474 bp, synthetic construct; identical to SEQ ID NO: 1678
  misc_feature 1..474: note = Description of Artificial Sequence: Synthetic destabilizing domain (DD)
  source 1..474: mol_type = other DNA

SEQ ID NO: 5171 - DNA, 474 bp, synthetic construct; identical to SEQ ID NO: 1679
  misc_feature 1..474: note = Description of Artificial Sequence: Synthetic destabilizing domain (DD)
  source 1..474: mol_type = other DNA

SEQ ID NO: 5172 - DNA, 474 bp, synthetic construct; identical to SEQ ID NO: 1680
  misc_feature 1..474: note = Description of Artificial Sequence: Synthetic destabilizing domain (DD)
  source 1..474: mol_type = other DNA

SEQ ID NO: 5173 - DNA, 474 bp, synthetic construct; identical to SEQ ID NO: 1681
  misc_feature 1..474: note = Description of Artificial Sequence: Synthetic destabilizing domain (DD)
  source 1..474: mol_type = other DNA

SEQ ID NO: 5174 - DNA, 477 bp, synthetic construct; identical to SEQ ID NO: 1682
  misc_feature 1..477: note = Description of Artificial Sequence: Synthetic destabilizing domain (DD)
  source 1..477: mol_type = other DNA

SEQ ID NO: 5175 - DNA, 474 bp, synthetic construct; identical to SEQ ID NO: 1683
  misc_feature 1..474: note = Description of Artificial Sequence: Synthetic destabilizing domain (DD)
  source 1..474: mol_type = other DNA

SEQ ID NO: 5176 - DNA, 474 bp, synthetic construct; identical to SEQ ID NO: 1684
  misc_feature 1..474: note = Description of Artificial Sequence: Synthetic destabilizing domain (DD)
  source 1..474: mol_type = other DNA

SEQ ID NO: 5177 - DNA, 558 bp, synthetic construct; identical to SEQ ID NO: 1685
  misc_feature 1..558: note = Description of Artificial Sequence: Synthetic destabilizing domain (DD)
  source 1..558: mol_type = other DNA

SEQ ID NO: 5178 - DNA, 558 bp, synthetic construct; identical to SEQ ID NO: 1686
  misc_feature 1..558: note = Description of Artificial Sequence: Synthetic destabilizing domain (DD)
  source 1..558: mol_type = other DNA

SEQ ID NO: 5179 - DNA, 561 bp, synthetic construct; identical to SEQ ID NO: 77
  misc_feature 1..561: note = Description of Artificial Sequence: Synthetic destabilizing domain (DD)
  source 1..561: mol_type = other DNA

SEQ ID NO: 5180 - DNA, 561 bp, synthetic construct; identical to SEQ ID NO: 1688
  misc_feature 1..561: note = Description of Artificial Sequence: Synthetic destabilizing domain (DD)
  source 1..561: mol_type = other DNA

SEQ ID NO: 5181 - DNA, 558 bp, synthetic construct; identical to SEQ ID NO: 1689
  misc_feature 1..558: note = Description of Artificial Sequence: Synthetic destabilizing domain (DD)
  source 1..558: mol_type = other DNA

SEQ ID NO: 5182 - DNA, 558 bp, synthetic construct; identical to SEQ ID NO: 1690
  misc_feature 1..558: note = Description of Artificial Sequence: Synthetic destabilizing domain (DD)
  source 1..558: mol_type = other DNA

SEQ ID NO: 5183 - DNA, 561 bp, synthetic construct; identical to SEQ ID NO: 83
  misc_feature 1..561: note = Description of Artificial Sequence: Synthetic destabilizing domain (DD)
  source 1..561: mol_type = other DNA

SEQ ID NO: 5184 - DNA, 558 bp, synthetic construct; identical to SEQ ID NO: 1692
  misc_feature 1..558: note = Description of Artificial Sequence: Synthetic destabilizing domain (DD)
  source 1..558: mol_type = other DNA

SEQ ID NO: 5185 - DNA, 561 bp, synthetic construct; identical to SEQ ID NO: 85
  misc_feature 1..561: note = Description of Artificial Sequence: Synthetic destabilizing domain (DD)
  source 1..561: mol_type = other DNA

SEQ ID NO: 5186 - DNA, 561 bp, synthetic construct; identical to SEQ ID NO: 1694
  misc_feature 1..561: note = Description of Artificial Sequence: Synthetic destabilizing domain (DD)
  source 1..561: mol_type = other DNA

SEQ ID NO: 5187 - DNA, 558 bp, synthetic construct; identical to SEQ ID NO: 1695
  misc_feature 1..558: note = Description of Artificial Sequence: Synthetic destabilizing domain (DD)
  source 1..558: mol_type = other DNA

SEQ ID NO: 5188 - DNA, 558 bp, synthetic construct; identical to SEQ ID NO: 1696
  misc_feature 1..558: note = Description of Artificial Sequence: Synthetic destabilizing domain (DD)
  source 1..558: mol_type = other DNA

SEQ ID NO: 5189 - DNA, 321 bp, synthetic construct; identical to SEQ ID NO: 1675
  misc_feature 1..321: note = Description of Artificial Sequence: Synthetic destabilizing domain (DD)
  source 1..321: mol_type = other DNA

SEQ ID NO: 5190 - DNA, 1461 bp, synthetic construct; identical to SEQ ID NO: 1697
  misc_feature 1..1461: note = Description of Artificial Sequence: Synthetic Construct
  source 1..1461: mol_type = other DNA

SEQ ID NO: 5191 - DNA, 1782 bp, synthetic construct; identical to SEQ ID NO: 1698
  misc_feature 1..1782: note = Description of Artificial Sequence: Synthetic Construct
  source 1..1782: mol_type = other DNA

SEQ ID NO: 5192 - DNA, 1935 bp, synthetic construct; identical to SEQ ID NO: 1699
  misc_feature 1..1935: note = Description of Artificial Sequence: Synthetic Construct
  source 1..1935: mol_type = other DNA

SEQ ID NO: 5193 - DNA, 1782 bp, synthetic construct; identical to SEQ ID NO: 1700
  misc_feature 1..1782: note = Description of Artificial Sequence: Synthetic Construct
  source 1..1782: mol_type = other DNA

SEQ ID NO: 5194 - DNA, 1935 bp, synthetic construct; identical to SEQ ID NO: 1701
  misc_feature 1..1935: note = Description of Artificial Sequence: Synthetic Construct
  source 1..1935: mol_type = other DNA

SEQ ID NO: 5195 - DNA, 1950 bp, synthetic construct; identical to SEQ ID NO: 1702
  misc_feature 1..1950: note = Description of Artificial Sequence: Synthetic Construct
  source 1..1950: mol_type = other DNA

SEQ ID NO: 5196 - DNA, 1797 bp, synthetic construct; identical to SEQ ID NO: 1703
  misc_feature 1..1797: note = Description of Artificial Sequence: Synthetic Construct
  source 1..1797: mol_type = other DNA

SEQ ID NO: 5197 - DNA, 2034 bp, synthetic construct; identical to SEQ ID NO: 165
  misc_feature 1..2034: note = Description of Artificial Sequence: Synthetic Construct
  source 1..2034: mol_type = other DNA

SEQ ID NO: 5198 - DNA, 2034 bp, synthetic construct; identical to SEQ ID NO: 166
  misc_feature 1..2034: note = Description of Artificial Sequence: Synthetic Construct
  source 1..2034: mol_type = other DNA

SEQ ID NO: 5199 - DNA, 2034 bp, synthetic construct; identical to SEQ ID NO: 167
  misc_feature 1..2034: note = Description of Artificial Sequence: Synthetic Construct
  source 1..2034: mol_type = other DNA

SEQ ID NO: 5200 - DNA, 2034 bp, synthetic construct; identical to SEQ ID NO: 1707
  misc_feature 1..2034: note = Description of Artificial Sequence: Synthetic Construct
  source 1..2034: mol_type = other DNA

SEQ ID NO: 5201 - DNA, 1824 bp, synthetic construct; identical to SEQ ID NO: 1708
  misc_feature 1..1824: note = Description of Artificial Sequence: Synthetic Construct
  source 1..1824: mol_type = other DNA

SEQ ID NO: 5202 - DNA, 1977 bp, synthetic construct; identical to SEQ ID NO: 1709
  misc_feature 1..1977: note = Description of Artificial Sequence: Synthetic Construct
  source 1..1977: mol_type = other DNA

SEQ ID NO: 5203 - DNA, 2061 bp, synthetic construct; identical to SEQ ID NO: 176
  misc_feature 1..2061: note = Description of Artificial Sequence: Synthetic Construct
  source 1..2061: mol_type = other DNA

SEQ ID NO: 5204 - DNA, 2061 bp, synthetic construct; identical to SEQ ID NO: 177
  misc_feature 1..2061: note = Description of Artificial Sequence: Synthetic Construct
  source 1..2061: mol_type = other DNA

SEQ ID NO: 5205 - DNA, 2034 bp, synthetic construct; identical to SEQ ID NO: 165
  misc_feature 1..2034: note = Description of Artificial Sequence: Synthetic polynucleotide
  source 1..2034: mol_type = other DNA

SEQ ID NO: 5206 - DNA, 1467 bp, synthetic construct; identical to SEQ ID NO: 1713
  misc_feature 1..1467: note = Description of Artificial Sequence: Synthetic polynucleotide
  source 1..1467: mol_type = other DNA

SEQ ID NO: 5207 - DNA, 1527 bp, synthetic construct; identical to SEQ ID NO: 1714
  misc_feature 1..1527: note = Description of Artificial Sequence: Synthetic polynucleotide
  source 1..1527: mol_type = other DNA

SEQ ID NO: 5208 - DNA, 1494 bp, synthetic construct; identical to SEQ ID NO: 1715
  misc_feature 1..1494: note = Description of Artificial Sequence: Synthetic polynucleotide
  source 1..1494: mol_type = other DNA

SEQ ID NO: 5209 - DNA, 1509 bp, synthetic construct; identical to SEQ ID NO: 1716
  misc_feature 1..1509: note = Description of Artificial Sequence: Synthetic polynucleotide
  source 1..1509: mol_type = other DNA

SEQ ID NO: 5210 - DNA, 1461 bp, synthetic construct
  misc_feature 1..1461: note = Description of Artificial Sequence: Synthetic polynucleotide
  source 1..1461: mol_type = other DNA
atggccttaccagtgaccgccttgctcctgccgctggccttgctgctccacgccgccaggccggacatccagatgacacagactacatcctccctgtctgcctctctgggagacagagtcaccatcagttgcagggcaagtcaggacattagtaaatatttaaattggtatcagcagaaaccagatggaactgttaaactcctgatctaccatacatcaagattacactcaggagtcccatcaaggttcagtggcagtgggtctggaacagattattctctcaccattagcaacctggagcaagaagatattgccacttacttttgccaacagggtaatacgcttccgtacacgttcggaggggggaccaagctggagatcacaggtggcggtggctcgggcggtggtgggtcgggtggcggcggatctgaggtgaaactgcaggagtcaggacctggcctggtggcgccctcacagagcctgtccgtcacatgcactgtctcaggggtctcattacccgactatggtgtaagctggattcgccagcctccacgaaagggtctggagtggctgggagtaatatggggtagtgaaaccacatactataattcagctctcaaatccagactgaccatcatcaaggacaactccaagagccaagttttcttaaaaatgaacagtctgcaaactgatgacacagccatttactactgtgccaaacattattactacggtggtagctatgctatggactactggggccaaggaacctcagtcaccgtctcctcaaccacgacgccagcgccgcgaccaccaacaccggcgcccaccatcgcgtcgcagcccctgtccctgcgcccagaggcgtgccggccagcggcggggggcgcagtgcacacgagggggctggacttcgcctgtgatatctacatctgggcgcccttggccgggacttgtggggtccttctcctgtcactggttatcaccctttactgcaaacggggcagaaagaaactcctgtatatattcaaacaaccatttatgagaccagtacaaactactcaagaggaagatggctgtagctgccgatttccagaagaagaagaaggaggatgtgaactgagagtgaagttcagcaggagcgcagacgcccccgcgtacaagcagggccagaaccagctctataacgagctcaatctaggacgaagagaggagtacgatgttttggacaagagacgtggccgggaccctgagatggggggaaagccgagaaggaagaaccctcaggaaggcctgtacaatgaactgcagaaagataagatggcggaggcctacagtgagattgggatgaaaggcgagcgccggaggggcaaggggcacgatggcctttaccagggtctcagtacagccaccaaggacacctacgacgcccttcacatgcaggccctgccccctcgctaa

SEQ ID NO: 5211 - DNA, 3158 bp, synthetic construct; identical to SEQ ID NO: 1718
  misc_feature 1..3158: note = Description of Artificial Sequence: Synthetic polynucleotide
  source 1..3158: mol_type = other DNA

SEQ ID NO: 5212 - DNA, 2232 bp, synthetic construct; identical to SEQ ID NO: 1719
  misc_feature 1..2232: note = Description of Artificial Sequence: Synthetic polynucleotide
  source 1..2232: mol_type = other DNA

SEQ ID NO: 5213 - DNA, 2658 bp, synthetic construct; identical to SEQ ID NO: 1720
  misc_feature 1..2658: note = Description of Artificial Sequence: Synthetic polynucleotide
  source 1..2658: mol_type = other DNA

SEQ ID NO: 5214 - DNA, 2724 bp, synthetic construct; identical to SEQ ID NO: 1721
  misc_feature 1..2724: note = Description of Artificial Sequence: Synthetic polynucleotide
  source 1..2724: mol_type = other DNA

SEQ ID NO: 5215 - DNA, 2712 bp, synthetic construct; identical to SEQ ID NO: 1722
  misc_feature 1..2712: note = Description of Artificial Sequence: Synthetic polynucleotide
  source 1..2712: mol_type = other DNA

SEQ ID NO: 5216 - DNA, 90 bp, synthetic construct; identical to SEQ ID NO: 1724
  misc_feature 1..90: note = Description of Artificial Sequence: Synthetic Leader sequence
  source 1..90: mol_type = other DNA

SEQ ID NO: 5217 - DNA, 12 bp, synthetic construct
  misc_feature 1..12: note = Description of Artificial Sequence: Synthetic Linker sequence
  source 1..12: mol_type = other DNA
gctagcttcgaa

SEQ ID NO: 5218 - DNA, 126 bp, Homo sapiens; identical to SEQ ID NO: 1731
  source 1..126: mol_type = other DNA

SEQ ID NO: 5219 - DNA, 729 bp, synthetic construct; identical to SEQ ID NO: 1733
  misc_feature 1..729: note = Description of Artificial Sequence: Synthetic Construct
  source 1..729: mol_type = other DNA

SEQ ID NO: 5220 - DNA, 135 bp, synthetic construct; identical to SEQ ID NO: 1735
  misc_feature 1..135: note = Description of Artificial Sequence: Synthetic Construct
  source 1..135: mol_type = other DNA

SEQ ID NO: 5221 - DNA, 72 bp, synthetic construct; identical to SEQ ID NO: 1737
  misc_feature 1..72: note = Description of Artificial Sequence: Synthetic Construct
  source 1..72: mol_type = other DNA

SEQ ID NO: 5222 - DNA, 336 bp, Homo sapiens; identical to SEQ ID NO: 1739
  source 1..336: mol_type = other DNA

SEQ ID NO: 5223 - DNA, 558 bp, synthetic construct; identical to SEQ ID NO: 1685
  misc_feature 1..558: note = Description of Artificial Sequence: Synthetic Destabilizing Domain (DD)
  source 1..558: mol_type = other DNA

SEQ ID NO: 5224 - DNA, 558 bp, synthetic construct; identical to SEQ ID NO: 1686
  misc_feature 1..558: note = Description of Artificial Sequence: Synthetic Destabilizing Domain (DD)
  source 1..558: mol_type = other DNA

SEQ ID NO: 5225 - DNA, 558 bp, synthetic construct; identical to SEQ ID NO: 1692
  misc_feature 1..558: note = Description of Artificial Sequence: Synthetic Destabilizing Domain (DD)
  source 1..558: mol_type = other DNA

SEQ ID NO: 5226 - protein, 686 aa, synthetic construct; identical to SEQ ID NO: 1171
  REGION 1..686: note = Description of Artificial Sequence: Synthetic Construct

SEQ ID NO: 5227 - DNA, 2061 bp, synthetic construct; identical to SEQ ID NO: 1744
  misc_feature 1..2061: note = Description of Artificial Sequence: Synthetic Construct
  source 1..2061: mol_type = other DNA

SEQ ID NO: 5228 - DNA, 738 bp, synthetic construct; identical to SEQ ID NO: 1746
  misc_feature 1..738: note = Description of Artificial Sequence: Synthetic scFV sequence
  source 1..738: mol_type = other DNA

SEQ ID NO: 5229 - DNA, 207 bp, Homo sapiens; identical to SEQ ID NO: 1748
  source 1..207: mol_type = other DNA

SEQ ID NO: 5230 - DNA, 336 bp, Homo sapiens; identical to SEQ ID NO: 1739
  source 1..336: mol_type = other DNA

SEQ ID NO: 5231 - DNA, 126 bp, Homo sapiens; identical to SEQ ID NO: 1731
  source 1..126: mol_type = other DNA

SEQ ID NO: 5232 - DNA, 63 bp, Homo sapiens; identical to SEQ ID NO: 1321
  source 1..63: mol_type = other DNA

SEQ ID NO: 5233 - DNA, 63 bp, synthetic construct; identical to SEQ ID NO: 1322
  misc_feature 1..63: note = Description of Artificial Sequence: Synthetic Signal Sequence
  source 1..63: mol_type = other DNA

SEQ ID NO: 5234 - DNA, 63 bp, synthetic construct; identical to SEQ ID NO: 1323
  misc_feature 1..63: note = Description of Artificial Sequence: Synthetic Signal Sequence
  source 1..63: mol_type = other DNA

SEQ ID NO: 5235 - DNA, 63 bp, synthetic construct; identical to SEQ ID NO: 1324
  misc_feature 1..63: note = Description of Artificial Sequence: Synthetic Signal Sequence
  source 1..63: mol_type = other DNA

SEQ ID NO: 5236 - DNA, 63 bp, synthetic construct; identical to SEQ ID NO: 1325
  misc_feature 1..63: note = Description of Artificial Sequence: Synthetic Signal Sequence
  source 1..63: mol_type = other DNA

SEQ ID NO: 5237 - DNA, 63 bp, synthetic construct; identical to SEQ ID NO: 1754
  misc_feature 1..63: note = Description of Artificial Sequence: Synthetic Leader sequence
  source 1..63: mol_type = other DNA

SEQ ID NO: 5238 - DNA, 474 bp, synthetic construct; identical to SEQ ID NO: 1678
  misc_feature 1..474: note = Description of Artificial Sequence: Synthetic Destabilizing Domain (DD)
  source 1..474: mol_type = other DNA

SEQ ID NO: 5239 - DNA, 474 bp, synthetic construct; identical to SEQ ID NO: 1676
  misc_feature 1..474: note = Description of Artificial Sequence: Synthetic Destabilizing Domain (DD)
  source 1..474: mol_type = other DNA

SEQ ID NO: 5240 - DNA, 477 bp, synthetic construct; identical to SEQ ID NO: 1677
  misc_feature 1..477: note = Description of Artificial Sequence: Synthetic Destabilizing Domain (DD)
  source 1..477: mol_type = other DNA

SEQ ID NO: 5241 - DNA, 474 bp, synthetic construct; identical to SEQ ID NO: 1678
  misc_feature 1..474: note = Description of Artificial Sequence: Synthetic Destabilizing Domain (DD)
  source 1..474: mol_type = other DNA

SEQ ID NO: 5242 - DNA, 474 bp, synthetic construct; identical to SEQ ID NO: 1679
  misc_feature 1..474: note = Description of Artificial Sequence: Synthetic Destabilizing Domain (DD)
  source 1..474: mol_type = other DNA

SEQ ID NO: 5243 - DNA, 474 bp, synthetic construct; identical to SEQ ID NO: 1680
  misc_feature 1..474: note = Description of Artificial Sequence: Synthetic Destabilizing Domain (DD)
  source 1..474: mol_type = other DNA

SEQ ID NO: 5244 - DNA, 474 bp, synthetic construct; identical to SEQ ID NO: 1681
  misc_feature 1..474: note = Description of Artificial Sequence: Synthetic Destabilizing Domain (DD)
  source 1..474: mol_type = other DNA

SEQ ID NO: 5245 - DNA, 321 bp, synthetic construct; identical to SEQ ID NO: 1764
  misc_feature 1..321: note = Description of Artificial Sequence: Synthetic Destabilizing Domain (DD)
  source 1..321: mol_type = other DNA

SEQ ID NO: 5246 - DNA, 324 bp, synthetic construct; identical to SEQ ID NO: 1669
  misc_feature 1..324: note = Description of Artificial Sequence: Synthetic Destabilizing Domain (DD)
  source 1..324: mol_type = other DNA

SEQ ID NO: 5247 - DNA, 324 bp, synthetic construct; identical to SEQ ID NO: 1670
  misc_feature 1..324: note = Description of Artificial Sequence: Synthetic Destabilizing Domain (DD)
  source 1..324: mol_type = other DNA

SEQ ID NO: 5248 - DNA, 324 bp, synthetic construct; identical to SEQ ID NO: 1671
  misc_feature 1..324: note = Description of Artificial Sequence: Synthetic Destabilizing Domain (DD)
  source 1..324: mol_type = other DNA

SEQ ID NO: 5249 - DNA, 324 bp, synthetic construct; identical to SEQ ID NO: 1672
  misc_feature 1..324: note = Description of Artificial Sequence: Synthetic Destabilizing Domain (DD)
  source 1..324: mol_type = other DNA

SEQ ID NO: 5250 - DNA, 321 bp, synthetic construct; identical to SEQ ID NO: 1673
  misc_feature 1..321: note = Description of Artificial Sequence: Synthetic Destabilizing Domain (DD)
  source 1..321: mol_type = other DNA

SEQ ID NO: 5251 - DNA, 321 bp, synthetic construct; identical to SEQ ID NO: 1674
  misc_feature 1..321: note = Description of Artificial Sequence: Synthetic Destabilizing Domain (DD)
  source 1..321: mol_type = other DNA

SEQ ID NO: 5252 - DNA, 321 bp, synthetic construct; identical to SEQ ID NO: 1675
  misc_feature 1..321: note = Description of Artificial Sequence: Synthetic Destabilizing Domain (DD)
  source 1..321: mol_type = other DNA

SEQ ID NO: 5253 - DNA, 1473 bp, synthetic construct; identical to SEQ ID NO: 1772
  misc_feature 1..1473: note = Description of Artificial Sequence: Synthetic Construct
  source 1..1473: mol_type = other DNA

SEQ ID NO: 5254 - DNA, 1800 bp, synthetic construct; identical to SEQ ID NO: 1773
  misc_feature 1..1800: note = Description of Artificial Sequence: Synthetic Construct
  source 1..1800: mol_type = other DNA

SEQ ID NO: 5255 - DNA, 1953 bp, synthetic construct; identical to SEQ ID NO: 1774
  misc_feature 1..1953: note = Description of Artificial Sequence: Synthetic Construct
  source 1..1953: mol_type = other DNA

SEQ ID NO: 5256 - DNA, 60 bp, synthetic construct; identical to SEQ ID NO: 1776
  misc_feature 1..60: note = Description of Artificial Sequence: Synthetic Signal Sequence
  source 1..60: mol_type = other DNA

SEQ ID NO: 5257 - DNA, 60 bp, Homo sapiens; identical to SEQ ID NO: 1777
  source 1..60: mol_type = other DNA

SEQ ID NO: 5258 - DNA, 60 bp, synthetic construct; identical to SEQ ID NO: 1778
  misc_feature 1..60: note = Description of Artificial Sequence: Synthetic Signal Sequence
  source 1..60: mol_type = other DNA

SEQ ID NO: 5259 - DNA, 60 bp, synthetic construct; identical to SEQ ID NO: 1779
  misc_feature 1..60: note = Description of Artificial Sequence: Synthetic Signal Sequence
  source 1..60: mol_type = other DNA

SEQ ID NO: 5260 - DNA, 18 bp, synthetic construct
  misc_feature 1..18: note = Description of Artificial Sequence: Synthetic Linker sequence
  source 1..18: mol_type = other DNA
gagttcagcaccgagttt

SEQ ID NO: 5261 - DNA, 402 bp, synthetic construct; identical to SEQ ID NO: 1783
  misc_feature 1..402: note = Description of Artificial Sequence: Synthetic Construct
  source 1..402: mol_type = other DNA

SEQ ID NO: 5262 - DNA, 402 bp, Homo sapiens; identical to SEQ ID NO: 1784
  source 1..402: mol_type = other DNA

SEQ ID NO: 5263 - DNA, 321 bp, synthetic construct; identical to SEQ ID NO: 1786
  misc_feature 1..321: note = Description of Artificial Sequence: Synthetic Destabilizing Domain (DD)
  source 1..321: mol_type = other DNA

SEQ ID NO: 5264 - DNA, 321 bp, synthetic construct; identical to SEQ ID NO: 1664
  misc_feature 1..321: note = Description of Artificial Sequence: Synthetic Destabilizing Domain (DD)
  source 1..321: mol_type = other DNA

SEQ ID NO: 5265 - DNA, 321 bp, synthetic construct; identical to SEQ ID NO: 1665
  misc_feature 1..321: note = Description of Artificial Sequence: Synthetic Destabilizing Domain (DD)
  source 1..321: mol_type = other DNA

SEQ ID NO: 5266 - DNA, 321 bp, synthetic construct; identical to SEQ ID NO: 1666
  misc_feature 1..321: note = Description of Artificial Sequence: Synthetic Destabilizing Domain (DD)
  source 1..321: mol_type = other DNA

SEQ ID NO: 5267 - DNA, 321 bp, synthetic construct; identical to SEQ ID NO: 1667
  misc_feature 1..321: note = Description of Artificial Sequence: Synthetic Destabilizing Domain (DD)
  source 1..321: mol_type = other DNA

SEQ ID NO: 5268 - DNA, 321 bp, synthetic construct; identical to SEQ ID NO: 1668
  misc_feature 1..321: note = Description of Artificial Sequence: Synthetic Destabilizing Domain (DD)
  source 1..321: mol_type = other DNA

SEQ ID NO: 5269 - DNA, 807 bp, synthetic construct; identical to SEQ ID NO: 1792
  misc_feature 1..807: note = Description of Artificial Sequence: Synthetic Construct
  source 1..807: mol_type = other DNA

SEQ ID NO: 5270 - DNA, 462 bp, synthetic construct; identical to SEQ ID NO: 1793
  misc_feature 1..462: note = Description of Artificial Sequence: Synthetic Construct
  source 1..462: mol_type = other DNA

SEQ ID NO: 5271 - DNA, 960 bp, synthetic construct; identical to SEQ ID NO: 1794
  misc_feature 1..960: note = Description of Artificial Sequence: Synthetic Construct
  source 1..960: mol_type = other DNA

SEQ ID NO: 5272 - protein, 133 aa, Homo sapiens [sequence omitted]

SEQ ID NO: 5273 - DNA, 603 bp, synthetic construct; identical to SEQ ID NO: 1795
  misc_feature 1..603: note = Description of Artificial Sequence: Synthetic promoter
  source 1..603: mol_type = other DNA

SEQ ID NO: 5274 - DNA, 1339 bp, synthetic construct; identical to SEQ ID NO: 1796
  misc_feature 1..1339: note = Description of Artificial Sequence: Synthetic promoter
  source 1..1339: mol_type = other DNA

SEQ ID NO: 5275 - DNA, 399 bp, synthetic construct; identical to SEQ ID NO: 1797
  misc_feature 1..399: note = Description of Artificial Sequence: Synthetic promoter
  source 1..399: mol_type = other DNA

SEQ ID NO: 5276 - DNA, 15 bp, synthetic construct
  misc_feature 1..15: note = Description of Artificial Sequence: Synthetic linker sequence
  source 1..15: mol_type = other DNA
tcaggcggggggagt

SEQ ID NO: 5277 - DNA, 66 bp, Homo sapiens; identical to SEQ ID NO: 1580
  source 1..66: mol_type = other DNA

SEQ ID NO: 5278 - DNA, 66 bp, synthetic construct; identical to SEQ ID NO: 1581
  misc_feature 1..66: note = Description of Artificial Sequence: Synthetic signal sequence
  source 1..66: mol_type = other DNA

SEQ ID NO: 5279 - DNA, 66 bp, synthetic construct; identical to SEQ ID NO: 1582
  misc_feature 1..66: note = Description of Artificial Sequence: Synthetic signal sequence
  source 1..66: mol_type = other DNA

SEQ ID NO: 5280 - DNA, 66 bp, synthetic construct; identical to SEQ ID NO: 1583
  misc_feature 1..66: note = Description of Artificial Sequence: Synthetic signal sequence
  source 1..66: mol_type = other DNA

SEQ ID NO: 5281 - DNA, 66 bp, synthetic construct; identical to SEQ ID NO: 1584
  misc_feature 1..66: note = Description of Artificial Sequence: Synthetic signal sequence
  source 1..66: mol_type = other DNA

SEQ ID NO: 5282 - DNA, 66 bp, synthetic construct; identical to SEQ ID NO: 1585
  misc_feature 1..66: note = Description of Artificial Sequence: Synthetic signal sequence
  source 1..66: mol_type = other DNA

SEQ ID NO: 5283 - DNA, 66 bp, synthetic construct; identical to SEQ ID NO: 1586
  misc_feature 1..66: note = Description of Artificial Sequence: Synthetic signal sequence
  source 1..66: mol_type = other DNA

SEQ ID NO: 5284 - DNA, 66 bp, synthetic construct; identical to SEQ ID NO: 1587
  misc_feature 1..66: note = Description of Artificial Sequence: Synthetic signal sequence
  source 1..66: mol_type = other DNA

SEQ ID NO: 5285 - DNA, 66 bp, synthetic construct; identical to SEQ ID NO: 1588
  misc_feature 1..66: note = Description of Artificial Sequence: Synthetic signal sequence
  source 1..66: mol_type = other DNA

SEQ ID NO: 5286 - DNA, 15 bp, synthetic construct
  misc_feature 1..15: note = Description of Artificial Sequence: Synthetic linker sequence
  source 1..15: mol_type = other DNA
ggaggatccggaggc

SEQ ID NO: 5287 - DNA, 15 bp, synthetic construct
  misc_feature 1..15: note = Description of Artificial Sequence: Synthetic linker sequence
  source 1..15: mol_type = other DNA
ggaggatctggagga

SEQ ID NO: 5288 - DNA, 45 bp, synthetic construct; identical to SEQ ID NO: 1636
  misc_feature 1..45: note = Description of Artificial Sequence: Synthetic linker sequence
  source 1..45: mol_type = other DNA

SEQ ID NO: 5289 - DNA, 45 bp, synthetic construct; identical to SEQ ID NO: 1637
  misc_feature 1..45: note = Description of Artificial Sequence: Synthetic linker sequence
  source 1..45: mol_type = other DNA

SEQ ID NO: 5290 - DNA, 45 bp, synthetic construct; identical to SEQ ID NO: 1638
  misc_feature 1..45: note = Description of Artificial Sequence: Synthetic linker sequence
  source 1..45: mol_type = other DNA

SEQ ID NO: 5291 - DNA, 45 bp, synthetic construct; identical to SEQ ID NO: 1639
  misc_feature 1..45: note = Description of Artificial Sequence: Synthetic linker sequence
  source 1..45: mol_type = other DNA

SEQ ID NO: 5292 - DNA, 45 bp, synthetic construct; identical to SEQ ID NO: 1640
  misc_feature 1..45: note = Description of Artificial Sequence: Synthetic linker sequence
  source 1..45: mol_type = other DNA

SEQ ID NO: 5293 - DNA, 45 bp, synthetic construct; identical to SEQ ID NO: 1641
  misc_feature 1..45: note = Description of Artificial Sequence: Synthetic linker sequence
  source 1..45: mol_type = other DNA

SEQ ID NO: 5294 - DNA, 57 bp, synthetic construct; identical to SEQ ID NO: 1800
  misc_feature 1..57: note = Description of Artificial Sequence: Synthetic spacer
  source 1..57: mol_type = other DNA

SEQ ID NO: 5295 - DNA, 27 bp, Homo sapiens
  source 1..27: mol_type = other DNA
agcgccaggaatcgccagaagcggtcc

SEQ ID NO: 5296 - DNA, 24 bp, Homo sapiens
  source 1..24: mol_type = other DNA
gcccggaatagacagaagagatct

SEQ ID NO: 5297 - DNA, 36 bp, synthetic construct; identical to SEQ ID NO: 1337
  misc_feature 1..36: note = Description of Artificial Sequence: Synthetic cleavage site
  source 1..36: mol_type = other DNA

SEQ ID NO: 5298 - DNA, 36 bp, synthetic construct; identical to SEQ ID NO: 1338
  misc_feature 1..36: note = Description of Artificial Sequence: Synthetic cleavage site
  source 1..36: mol_type = other DNA

SEQ ID NO: 5299 - DNA, 36 bp, synthetic construct; identical to SEQ ID NO: 1339
  misc_feature 1..36: note = Description of Artificial Sequence: Synthetic cleavage site
  source 1..36: mol_type = other DNA

SEQ ID NO: 5300 - DNA, 60 bp, synthetic construct; identical to SEQ ID NO: 1806
  misc_feature 1..60: note = Description of Artificial Sequence: Synthetic cleavable peptide
  source 1..60: mol_type = other DNA

SEQ ID NO: 5301 - DNA, 921 bp, synthetic construct; identical to SEQ ID NO: 1593
  misc_feature 1..921: note = Description of Artificial Sequence: Synthetic payload
  source 1..921: mol_type = other DNA

SEQ ID NO: 5302 - DNA, 918 bp, synthetic construct; identical to SEQ ID NO: 1594
  misc_feature 1..918: note = Description of Artificial Sequence: Synthetic payload
  source 1..918: mol_type = other DNA

SEQ ID NO: 5303 - DNA, 918 bp, synthetic construct; identical to SEQ ID NO: 1595
  misc_feature 1..918: note = Description of Artificial Sequence: Synthetic payload
  source 1..918: mol_type = other DNA

SEQ ID NO: 5304 - DNA, 918 bp, synthetic construct; identical to SEQ ID NO: 1596
  misc_feature 1..918: note = Description of Artificial Sequence: Synthetic payload
  source 1..918: mol_type = other DNA

SEQ ID NO: 5305 - DNA, 918 bp, synthetic construct; identical to SEQ ID NO: 1597
  misc_feature 1..918: note = Description of Artificial Sequence: Synthetic payload
  source 1..918: mol_type = other DNA

SEQ ID NO: 5306 - DNA, 918 bp, synthetic construct; identical to SEQ ID NO: 1590
  misc_feature 1..918: note = Description of Artificial Sequence: Synthetic payload
  source 1..918: mol_type = other DNA

SEQ ID NO: 5307 - DNA, 918 bp, synthetic construct; identical to SEQ ID NO: 1591
  misc_feature 1..918: note = Description of Artificial Sequence: Synthetic payload
  source 1..918: mol_type = other DNA

SEQ ID NO: 5308 - DNA, 918 bp, synthetic construct; identical to SEQ ID NO: 1600
  misc_feature 1..918: note = Description of Artificial Sequence: Synthetic payload
  source 1..918: mol_type = other DNA

SEQ ID NO: 5309 - DNA, 918 bp, synthetic construct; identical to SEQ ID NO: 1601
  misc_feature 1..918: note = Description of Artificial Sequence: Synthetic payload
  source 1..918: mol_type = other DNA

SEQ ID NO: 5310 - DNA, 918 bp, synthetic construct; identical to SEQ ID NO: 1602
  misc_feature 1..918: note = Description of Artificial Sequence: Synthetic payload
  source 1..918: mol_type = other DNA

SEQ ID NO: 5311 - DNA, 918 bp, synthetic construct; identical to SEQ ID NO: 1590
  misc_feature 1..918: note = Description of Artificial Sequence: Synthetic payload
  source 1..918: mol_type = other DNA

SEQ ID NO: 5312 - DNA, 918 bp, synthetic construct; identical to SEQ ID NO: 1591
  misc_feature 1..918: note = Description of Artificial Sequence: Synthetic payload
  source 1..918: mol_type = other DNA

SEQ ID NO: 5313 - DNA, 918 bp, synthetic construct; identical to SEQ ID NO: 1591
  misc_feature 1..918: note = Description of Artificial Sequence: Synthetic payload
  source 1..918: mol_type = other DNA

SEQ ID NO: 5314 - DNA, 918 bp, synthetic construct; identical to SEQ ID NO: 1808
  misc_feature 1..918: note = Description of Artificial Sequence: Synthetic payload
  source 1..918: mol_type = other DNA

SEQ ID NO: 5315 - DNA, 594 bp, synthetic construct; identical to SEQ ID NO: 1604
  misc_feature 1..594: note = Description of Artificial Sequence: Synthetic payload
  source 1..594: mol_type = other DNA

SEQ ID NO: 5316 - DNA, 594 bp, synthetic construct; identical to SEQ ID NO: 1605
  misc_feature 1..594: note = Description of Artificial Sequence: Synthetic payload
  source 1..594: mol_type = other DNA

SEQ ID NO: 5317 - DNA, 594 bp, synthetic construct; identical to SEQ ID NO: 1606
  misc_feature 1..594: note = Description of Artificial Sequence: Synthetic payload
  source 1..594: mol_type = other DNA

SEQ ID NO: 5318 - DNA, 594 bp, synthetic construct; identical to SEQ ID NO: 1607
  misc_feature 1..594: note = Description of Artificial Sequence: Synthetic payload
  source 1..594: mol_type = other DNA

SEQ ID NO: 5319 - DNA, 591 bp, synthetic construct; identical to SEQ ID NO: 1608
  misc_feature 1..591: note = Description of Artificial Sequence: Synthetic payload
  source 1..591: mol_type = other DNA

SEQ ID NO: 5320 - DNA, 591 bp, synthetic construct; identical to SEQ ID NO: 1609
  misc_feature 1..591: note = Description of Artificial Sequence: Synthetic payload
  source 1..591: mol_type = other DNA

SEQ ID NO: 5321 - DNA, 594 bp, synthetic construct; identical to SEQ ID NO: 1610
  misc_feature 1..594: note = Description of Artificial Sequence: Synthetic payload
  source 1..594: mol_type = other DNA

SEQ ID NO: 5322 - DNA, 597 bp, synthetic construct; identical to SEQ ID NO: 1611
  misc_feature 1..597: note = Description of Artificial Sequence: Synthetic payload
  source 1..597: mol_type = other DNA

SEQ ID NO: 5323 - DNA, 597 bp, synthetic construct; identical to SEQ ID NO: 1612
  misc_feature 1..597: note = Description of Artificial Sequence: Synthetic payload
  source 1..597: mol_type = other DNA

SEQ ID NO: 5324 - DNA, 591 bp, synthetic construct; identical to SEQ ID NO: 1613
  misc_feature 1..591: note = Description of Artificial Sequence: Synthetic payload
  source 1..591: mol_type = other DNA

SEQ ID NO: 5325 - DNA, 591 bp, synthetic construct; identical to SEQ ID NO: 1614
  misc_feature 1..591: note = Description of Artificial Sequence: Synthetic payload
  source 1..591: mol_type = other DNA

SEQ ID NO: 5326 - protein, 197 aa, Homo sapiens; identical to SEQ ID NO: 735

SEQ ID NO: 5327 - DNA, 594 bp, Homo sapiens; identical to SEQ ID NO: 1604
  source 1..594: mol_type = other DNA

SEQ ID NO: 5328 - DNA, 594 bp, synthetic construct; identical to SEQ ID NO: 1606
  misc_feature 1..594: note = Description of Artificial Sequence: Synthetic construct
  source 1..594: mol_type = other DNA

SEQ ID NO: 5329 - DNA, 594 bp, synthetic construct; identical to SEQ ID NO: 1606
  misc_feature 1..594: note = Description of Artificial Sequence: Synthetic construct
  source 1..594: mol_type = other DNA

SEQ ID NO: 5330 - DNA, 594 bp, synthetic construct; identical to SEQ ID NO: 1607
  misc_feature 1..594: note = Description of Artificial Sequence: Synthetic construct
  source 1..594: mol_type = other DNA

SEQ ID NO: 5331 - DNA, 591 bp, synthetic construct; identical to SEQ ID NO: 1608
  misc_feature 1..591: note = Description of Artificial Sequence: Synthetic construct
  source 1..591: mol_type = other DNA

SEQ ID NO: 5332 - DNA, 591 bp, synthetic construct; identical to SEQ ID NO: 1609
  misc_feature 1..591: note = Description of Artificial Sequence: Synthetic construct
  source 1..591: mol_type = other DNA

SEQ ID NO: 5333 - DNA, 594 bp, synthetic construct; identical to SEQ ID NO: 1610
  misc_feature 1..594: note = Description of Artificial Sequence: Synthetic construct
  source 1..594: mol_type = other DNA

SEQ ID NO: 5334 - DNA, 597 bp, synthetic construct; identical to SEQ ID NO: 1611
  misc_feature 1..597: note = Description of Artificial Sequence: Synthetic construct
  source 1..597: mol_type = other DNA

SEQ ID NO: 5335 - DNA, 597 bp, synthetic construct; identical to SEQ ID NO: 1612
  misc_feature 1..597: note = Description of Artificial Sequence: Synthetic construct
  source 1..597: mol_type = other DNA

SEQ ID NO: 5336 - DNA, 591 bp, synthetic construct; identical to SEQ ID NO: 1613
  misc_feature 1..591: note = Description of Artificial Sequence: Synthetic construct
  source 1..591: mol_type = other DNA

SEQ ID NO: 5337 - protein, 158 aa, synthetic construct; identical to SEQ ID NO: 1174
  REGION 1..158: note = Description of Artificial Sequence: Synthetic destabilizing domain (DD)

SEQ ID NO: 5338 - DNA, 474 bp, synthetic construct; identical to SEQ ID NO: 1676
  misc_feature 1..474: note = Description of Artificial Sequence: Synthetic destabilizing domain (DD)
  source 1..474: mol_type = other DNA

SEQ ID NO: 5339 - DNA, 477 bp, synthetic construct; identical to SEQ ID NO: 1677
  misc_feature 1..477: note = Description of Artificial Sequence: Synthetic destabilizing domain (DD)
  source 1..477: mol_type = other DNA

SEQ ID NO: 5340 - DNA, 474 bp, synthetic construct; identical to SEQ ID NO: 1678
  misc_feature 1..474: note = Description of Artificial Sequence: Synthetic destabilizing domain (DD)
  source 1..474: mol_type = other DNA

SEQ ID NO: 5341 - DNA, 474 bp, synthetic construct; identical to SEQ ID NO: 1679
  misc_feature 1..474: note = Description of Artificial Sequence: Synthetic destabilizing domain (DD)
  source 1..474: mol_type = other DNA

SEQ ID NO: 5342 - DNA, 474 bp, synthetic construct; identical to SEQ ID NO: 1680
  misc_feature 1..474: note = Description of Artificial Sequence: Synthetic destabilizing domain (DD)
  source 1..474: mol_type = other DNA

SEQ ID NO: 5343 - DNA, 474 bp, synthetic construct; identical to SEQ ID NO: 1681
  misc_feature 1..474: note = Description of Artificial Sequence: Synthetic destabilizing domain (DD)
  source 1..474: mol_type = other DNA

SEQ ID NO: 5344 - protein, 107 aa, synthetic construct; identical to SEQ ID NO: 1176
  REGION 1..107: note = Description of Artificial Sequence: Synthetic destabilizing domain (DD)

SEQ ID NO: 5345 - DNA, 321 bp, synthetic construct; identical to SEQ ID NO: 1664
  misc_feature 1..321: note = Description of Artificial Sequence: Synthetic destabilizing domain (DD)
  source 1..321: mol_type = other DNA

SEQ ID NO: 5346 - DNA, 321 bp, synthetic construct; identical to SEQ ID NO: 1665
  misc_feature 1..321: note = Description of Artificial Sequence: Synthetic destabilizing domain (DD)
  source 1..321: mol_type = other DNA

SEQ ID NO: 5347 - DNA, 321 bp, synthetic construct; identical to SEQ ID NO: 1666
  misc_feature 1..321: note = Description of Artificial Sequence: Synthetic destabilizing domain (DD)
  source 1..321: mol_type = other DNA

SEQ ID NO: 5348 - DNA, 321 bp, synthetic construct; identical to SEQ ID NO: 1667
  misc_feature 1..321: note = Description of Artificial Sequence: Synthetic destabilizing domain (DD)
  source 1..321: mol_type = other DNA

SEQ ID NO: 5349 - DNA, 321 bp, synthetic construct; identical to SEQ ID NO: 1668
  misc_feature 1..321: note = Description of Artificial Sequence: Synthetic destabilizing domain (DD)
  source 1..321: mol_type = other DNA

SEQ ID NO: 5350 - protein, 107 aa, synthetic construct; identical to SEQ ID NO: 1177
  REGION 1..107: note = Description of Artificial Sequence: Synthetic destabilizing domain (DD)

SEQ ID NO: 5351 - DNA, 324 bp, synthetic construct; identical to SEQ ID NO: 1669
  misc_feature 1..324: note = Description of Artificial Sequence: Synthetic destabilizing domain (DD)
  source 1..324: mol_type = other DNA

SEQ ID NO: 5352 - DNA, 324 bp, synthetic construct; identical to SEQ ID NO: 1670
  misc_feature 1..324: note = Description of Artificial Sequence: Synthetic destabilizing domain (DD)
  source 1..324: mol_type = other DNA

SEQ ID NO: 5353 - DNA, 324 bp, synthetic construct; identical to SEQ ID NO: 1671
  misc_feature 1..324: note = Description of Artificial Sequence: Synthetic destabilizing domain (DD)
  source 1..324: mol_type = other DNA

SEQ ID NO: 5354 - DNA, 324 bp, synthetic construct; identical to SEQ ID NO: 1672
  misc_feature 1..324: note = Description of Artificial Sequence: Synthetic destabilizing domain (DD)
  source 1..324: mol_type = other DNA

SEQ ID NO: 5355 - DNA, 321 bp, synthetic construct; identical to SEQ ID NO: 1673
  misc_feature 1..321: note = Description of Artificial Sequence: Synthetic destabilizing domain (DD)
  source 1..321: mol_type = other DNA

SEQ ID NO: 5356 - DNA, 321 bp, synthetic construct; identical to SEQ ID NO: 1674
  misc_feature 1..321: note = Description of Artificial Sequence: Synthetic destabilizing domain (DD)
  source 1..321: mol_type = other DNA

SEQ ID NO: 5357 - DNA, 321 bp, synthetic construct; identical to SEQ ID NO: 1675
  misc_feature 1..321: note = Description of Artificial Sequence: Synthetic destabilizing domain (DD)
  source 1..321: mol_type = other DNA

SEQ ID NO: 5358 - DNA, 558 bp, synthetic construct; identical to SEQ ID NO: 86
  misc_feature 1..558: note = Description of Artificial Sequence: Synthetic destabilizing domain (DD)
  source 1..558: mol_type = other DNA

SEQ ID NO: 5359 - DNA, 558 bp, synthetic construct; identical to SEQ ID NO: 1820
  misc_feature 1..558: note = Description of Artificial Sequence: Synthetic destabilizing domain (DD)
  source 1..558: mol_type = other DNA

SEQ ID NO: 5360 - DNA, 558 bp, synthetic construct; identical to SEQ ID NO: 1685
  misc_feature 1..558: note = Description of Artificial Sequence: Synthetic destabilizing domain (DD)
  source 1..558: mol_type = other DNA

SEQ ID NO: 5361 - DNA, 558 bp, synthetic construct; identical to SEQ ID NO: 1686
  misc_feature 1..558: note = Description of Artificial Sequence: Synthetic destabilizing domain (DD)
  source 1..558: mol_type = other DNA

SEQ ID NO: 5362 - DNA, 1959 bp, synthetic construct; identical to SEQ ID NO: 1822
  misc_feature 1..1959: note = Description of Artificial Sequence: Synthetic construct
  source 1..1959: mol_type = other DNA

SEQ ID NO: 5363 - DNA, 1962 bp, synthetic construct; identical to SEQ ID NO: 1824
  misc_feature 1..1962: note = Description of Artificial Sequence: Synthetic construct
  source 1..1962: mol_type = other DNA

SEQ ID NO: 5364 - DNA, 1971 bp, synthetic construct; identical to SEQ ID NO: 1826
  misc_feature 1..1971: note = Description of Artificial Sequence: Synthetic construct
  source 1..1971: mol_type = other DNA

SEQ ID NO: 5365 - DNA, 1968 bp, synthetic construct; identical to SEQ ID NO: 1828
  misc_feature 1..1968: note = Description of Artificial Sequence: Synthetic construct
  source 1..1968: mol_type = other DNA

SEQ ID NO: 5366 - DNA, 1956 bp, synthetic construct; identical to SEQ ID NO: 1830
  misc_feature 1..1956: note = Description of Artificial Sequence: Synthetic construct
  source 1..1956: mol_type = other DNA

SEQ ID NO: 5367 - DNA, 1623 bp, synthetic construct; identical to SEQ ID NO: 172
  misc_feature 1..1623: note = Description of Artificial Sequence: Synthetic construct
  source 1..1623: mol_type = other DNA

SEQ ID NO: 5368 - DNA, 2130 bp, synthetic construct; identical to SEQ ID NO: 1834
  misc_feature 1..2130: note = Description of Artificial Sequence: Synthetic construct
  source 1..2130: mol_type = other DNA

SEQ ID NO: 5369 - DNA, 2214 bp, synthetic construct; identical to SEQ ID NO: 173
  misc_feature 1..2214: note = Description of Artificial Sequence: Synthetic construct
  source 1..2214: mol_type = other DNA

SEQ ID NO: 5370 - DNA, 1980 bp, synthetic construct; identical to SEQ ID NO: 1838
  misc_feature 1..1980: note = Description of Artificial Sequence: Synthetic construct
  source 1..1980: mol_type = other DNA

SEQ ID NO: 5371 - DNA, 1623 bp, synthetic construct; identical to SEQ ID NO: 172
  misc_feature 1..1623: note = Description of Artificial Sequence: Synthetic construct
  source 1..1623: mol_type = other DNA

SEQ ID NO: 5372 - DNA, 1956 bp, synthetic construct; identical to SEQ ID NO: 1830
  misc_feature 1..1956: note = Description of Artificial Sequence: Synthetic construct
  source 1..1956: mol_type = other DNA

SEQ ID NO: 5373 - DNA, 1959 bp, synthetic construct; identical to SEQ ID NO: 1822
  misc_feature 1..1959: note = Description of Artificial Sequence: Synthetic construct
  source 1..1959: mol_type = other DNA

SEQ ID NO: 5374 - DNA, 603 bp, synthetic construct; identical to SEQ ID NO: 1795
  misc_feature 1..603: note = Description of Artificial Sequence: Synthetic promoter
  source 1..603: mol_type = other DNA

SEQ ID NO: 5375 - DNA, 1339 bp, synthetic construct; identical to SEQ ID NO: 1796
  misc_feature 1..1339: note = Description of Artificial Sequence: Synthetic promoter
  source 1..1339: mol_type = other DNA

SEQ ID NO: 5376 - DNA, 1335 bp, synthetic construct; identical to SEQ ID NO: 1798
  misc_feature 1..1335: note = Description of Artificial Sequence: Synthetic promoter
  source 1..1335: mol_type = other DNA

SEQ ID NO: 5377 - DNA, 399 bp, synthetic construct; identical to SEQ ID NO: 1797
  misc_feature 1..399: note = Description of Artificial Sequence: Synthetic promoter
  source 1..399: mol_type = other DNA

SEQ ID NO: 5378 - DNA, 603 bp, synthetic construct; identical to SEQ ID NO: 1795
  misc_feature 1..603: note = Description of Artificial Sequence: Synthetic promoter
  source 1..603: mol_type = other DNA

SEQ ID NO: 5379 - DNA, 1339 bp, synthetic construct; identical to SEQ ID NO: 1796
  misc_feature 1..1339: note = Description of Artificial Sequence: Synthetic promoter
  source 1..1339: mol_type = other DNA

SEQ ID NO: 5380 - DNA, 1335 bp, synthetic construct; identical to SEQ ID NO: 1798
  misc_feature 1..1335: note = Description of Artificial Sequence: Synthetic promoter
  source 1..1335: mol_type = other DNA

SEQ ID NO: 5381 - DNA, 399 bp, synthetic construct; identical to SEQ ID NO: 1797
  misc_feature 1..399: note = Description of Artificial Sequence: Synthetic promoter
  source 1..399: mol_type = other DNA

SEQ ID NO: 5382 - DNA, 60 bp, Homo sapiens; identical to SEQ ID NO: 1776
  source 1..60: mol_type = other DNA

SEQ ID NO: 5383 - DNA, 60 bp, synthetic construct; identical to SEQ ID NO: 1777
  misc_feature 1..60: note = Description of Artificial Sequence: Synthetic signal sequence
  source 1..60: mol_type = other DNA

SEQ ID NO: 5384 - DNA, 60 bp, synthetic construct; identical to SEQ ID NO: 1778
  misc_feature 1..60: note = Description of Artificial Sequence: Synthetic signal sequence
  source 1..60: mol_type = other DNA

SEQ ID NO: 5385 - DNA, 60 bp, synthetic construct; identical to SEQ ID NO: 1779
  misc_feature 1..60: note = Description of Artificial Sequence: Synthetic signal sequence
  source 1..60: mol_type = other DNA

SEQ ID NO: 5386 - DNA, 54 bp, Homo sapiens; identical to SEQ ID NO: 1850
  source 1..54: mol_type = other DNA

SEQ ID NO: 5387 - DNA, 54 bp, Homo sapiens; identical to SEQ ID NO: 1851
  source 1..54: mol_type = other DNA

SEQ ID NO: 5388 - DNA, 54 bp, Homo sapiens; identical to SEQ ID NO: 1852
  source 1..54: mol_type = other DNA

SEQ ID NO: 5389 - DNA, 18 bp, synthetic construct
  misc_feature 1..18: note = Description of Artificial Sequence: Synthetic linker sequence
  source 1..18: mol_type = other DNA
gagttcagcaccgagttt

SEQ ID NO: 5390 - DNA, 18 bp, synthetic construct
  misc_feature 1..18: note = Description of Artificial Sequence: Synthetic linker sequence
  source 1..18: mol_type = other DNA
gagttctccaccgagttc

SEQ ID NO: 5391 - DNA, 15 bp, synthetic construct
  misc_feature 1..15: note = Description of Artificial Sequence: Synthetic linker sequence
  source 1..15: mol_type = other DNA
ggaggcagcggagga

SEQ ID NO: 5392 - DNA, 15 bp, synthetic construct
  misc_feature 1..15: note = Description of Artificial Sequence: Synthetic linker sequence
  source 1..15: mol_type = other DNA
ggaggctctggagga

SEQ ID NO: 5393 - DNA, 15 bp, synthetic construct
  misc_feature 1..15: note = Description of Artificial Sequence: Synthetic linker sequence
  source 1..15: mol_type = other DNA
ggaggctccggcgga

SEQ ID NO: 5394 - DNA, 15 bp, synthetic construct
  misc_feature 1..15: note = Description of Artificial Sequence: Synthetic linker sequence
  source 1..15: mol_type = other DNA
ggaggatccggaggc

SEQ ID NO: 5395 - DNA, 15 bp, synthetic construct
  misc_feature 1..15: note = Description of Artificial Sequence: Synthetic linker sequence
  source 1..15: mol_type = other DNA
ggaggatctggagga

SEQ ID NO: 5396 - DNA, 27 bp, synthetic construct
  misc_feature 1..27: note = Description of Artificial Sequence: Synthetic HA tag
  source 1..27: mol_type = other DNA
tacccatacgatgttccagattacgct

SEQ ID NO: 5397 - DNA, 27 bp, synthetic construct
  misc_feature 1..27: note = Description of Artificial Sequence: Synthetic HA tag
  source 1..27: mol_type = other DNA
tatccttacgatgtgcccgactatgct

SEQ ID NO: 5398 - DNA, 27 bp, synthetic construct
  misc_feature 1..27: note = Description of Artificial Sequence: Synthetic HA tag
  source 1..27: mol_type = other DNA
tatccgtacgacgtaccagactacgca

SEQ ID NO: 5399 - DNA, 60 bp, synthetic construct; identical to SEQ ID NO: 1806
  misc_feature 1..60: note = Description of Artificial Sequence: Synthetic cleavable peptide
  source 1..60: mol_type = other DNA

SEQ ID NO: 5400 - DNA, 705 bp, synthetic construct; identical to SEQ ID NO: 1626
  misc_feature 1..705: note = Description of Artificial Sequence: Synthetic polynucleotide
  source 1..705: mol_type = other DNA

SEQ ID NO: 5401 - DNA, 345 bp, Homo sapiens; identical to SEQ ID NO: 168
  source 1..345: mol_type = other DNA

SEQ ID NO: 5402 - DNA, 345 bp, synthetic construct; identical to SEQ ID NO: 1617
  misc_feature 1..345: note = Description of Artificial Sequence: Synthetic payload
  source 1..345: mol_type = other DNA

SEQ ID NO: 5403 - DNA, 345 bp, synthetic construct; identical to SEQ ID NO: 1618
  misc_feature 1..345: note = Description of Artificial Sequence: Synthetic payload
  source 1..345: mol_type = other DNA

SEQ ID NO: 5404 - DNA, 342 bp, synthetic construct; identical to SEQ ID NO: 1619
  misc_feature 1..342: note = Description of Artificial Sequence: Synthetic payload
  source 1..342: mol_type = other DNA

SEQ ID NO: 5405 - DNA, 342 bp, synthetic construct; identical to SEQ ID NO: 1620
  misc_feature 1..342: note = Description of Artificial Sequence: Synthetic payload
  source 1..342: mol_type = other DNA

SEQ ID NO: 5406 - DNA, 405 bp, synthetic construct; identical to SEQ ID NO: 1857
  misc_feature 1..405: note = Description of Artificial Sequence: Synthetic polynucleotide
  source 1..405: mol_type = other DNA

SEQ ID NO: 5407 - DNA, 912 bp, synthetic construct; identical to SEQ ID NO: 1859
  misc_feature 1..912: note = Description of Artificial Sequence: Synthetic polynucleotide
  source 1..912: mol_type = other DNA

SEQ ID NO: 5408 - DNA, 432 bp, synthetic construct; identical to SEQ ID NO: 1861
  misc_feature 1..432: note = Description of Artificial Sequence: Synthetic polynucleotide
  source 1..432: mol_type = other DNA

SEQ ID NO: 5409 - DNA, 1170 bp, synthetic construct; identical to SEQ ID NO: 1863
  misc_feature 1..1170: note = Description of Artificial Sequence: Synthetic polynucleotide
  source 1..1170: mol_type = other DNA

SEQ ID NO: 5410 - DNA, 1734 bp, synthetic construct; identical to SEQ ID NO: 1865
  misc_feature 1..1734: note = Description of Artificial Sequence: Synthetic polynucleotide
  source 1..1734: mol_type = other DNA

SEQ ID NO: 5411 - DNA, 603 bp, synthetic construct; identical to SEQ ID NO: 1795
  misc_feature 1..603: note = Description of Artificial Sequence: Synthetic promoter
  source 1..603: mol_type = other DNA

SEQ ID NO: 5412 - DNA, 1339 bp, synthetic construct; identical to SEQ ID NO: 1796
  misc_feature 1..1339: note = Description of Artificial Sequence: Synthetic promoter
  source 1..1339: mol_type = other DNA

SEQ ID NO: 5413 - DNA, 1335 bp, synthetic construct; identical to SEQ ID NO: 1798
  misc_feature 1..1335: note = Description of Artificial Sequence: Synthetic promoter
  source 1..1335: mol_type = other DNA

SEQ ID NO: 5414 - DNA, 399 bp, synthetic construct; identical to SEQ ID NO: 1797
  misc_feature 1..399: note = Description of Artificial Sequence: Synthetic promoter
  source 1..399: mol_type = other DNA

SEQ ID NO: 5415 - DNA, 60 bp, Homo sapiens; identical to SEQ ID NO: 1776
  source 1..60: mol_type = other DNA

SEQ ID NO: 5416 - DNA, 60 bp, synthetic construct; identical to SEQ ID NO: 1777
  misc_feature 1..60: note = Description of Artificial Sequence: Synthetic signal sequence
  source 1..60: mol_type = other DNA

SEQ ID NO: 5417 - DNA, 60 bp, synthetic construct; identical to SEQ ID NO: 1778
  misc_feature 1..60: note = Description of Artificial Sequence: Synthetic signal sequence
  source 1..60: mol_type = other DNA

SEQ ID NO: 5418 - DNA, 60 bp, synthetic construct; identical to SEQ ID NO: 1779
  misc_feature 1..60: note = Description of Artificial Sequence: Synthetic signal sequence
  source 1..60: mol_type = other DNA

SEQ ID NO: 5419 - DNA, 54 bp, Homo sapiens; identical to SEQ ID NO: 1850
  source 1..54: mol_type = other DNA

SEQ ID NO: 5420 - DNA, 54 bp, synthetic construct; identical to SEQ ID NO: 1851
  misc_feature 1..54: note = Description of Artificial Sequence: Synthetic signal sequence
  source 1..54: mol_type = other DNA

SEQ ID NO: 5421 - DNA, 54 bp, synthetic construct; identical to SEQ ID NO: 1852
  misc_feature 1..54: note = Description of Artificial Sequence: Synthetic signal sequence
  source 1..54: mol_type = other DNA

SEQ ID NO: 5422 - DNA, 18 bp, synthetic construct
  misc_feature 1..18: note = Description of Artificial Sequence: Synthetic linker sequence
  source 1..18: mol_type = other DNA
gagttcagcaccgagttt

SEQ ID NO: 5423 - DNA, 18 bp, synthetic construct
  misc_feature 1..18: note = Description of Artificial Sequence: Synthetic linker sequence
  source 1..18: mol_type = other DNA
gagttctccaccgagttc

SEQ ID NO: 5424 - DNA, 15 bp, synthetic construct
  misc_feature 1..15: note = Description of Artificial Sequence: Synthetic linker sequence
  source 1..15: mol_type = other DNA
ggaggcagcggagga

SEQ ID NO: 5425 - DNA, 15 bp, synthetic construct
  misc_feature 1..15: note = Description of Artificial Sequence: Synthetic linker sequence
  source 1..15: mol_type = other DNA
ggaggctctggagga

SEQ ID NO: 5426 - DNA, 15 bp, synthetic construct
  misc_feature 1..15: note = Description of Artificial Sequence: Synthetic linker sequence
  source 1..15: mol_type = other DNA
ggaggctccggcgga

SEQ ID NO: 5427 - DNA, 15 bp, synthetic construct
  misc_feature 1..15: note = Description of Artificial Sequence: Synthetic linker sequence
  source 1..15: mol_type = other DNA
ggaggatccggaggc

SEQ ID NO: 5428 - DNA, 15 bp, synthetic construct
  misc_feature 1..15: note = Description of Artificial Sequence: Synthetic linker sequence
  source 1..15: mol_type = other DNA
ggaggatctggagga

SEQ ID NO: 5429 - DNA, 27 bp, synthetic construct
  misc_feature 1..27: note = Description of Artificial Sequence: Synthetic HA tag
  source 1..27: mol_type = other DNA
tacccatacgatgttccagattacgct

SEQ ID NO: 5430 - DNA, 27 bp, synthetic construct
  misc_feature 1..27: note = Description of Artificial Sequence: Synthetic HA tag
  source 1..27: mol_type = other DNA
tatccttacgatgtgcccgactatgct

SEQ ID NO: 5431 - DNA, 60 bp, synthetic construct; identical to SEQ ID NO: 1806
  misc_feature 1..60: note = Description of Artificial Sequence: Synthetic cleavable peptide
  source 1..60: mol_type = other DNA

SEQ ID NO: 5432 - DNA, 708 bp, synthetic construct; identical to SEQ ID NO: 1896
  misc_feature 1..708: note = Description of Artificial Sequence: Synthetic polynucleotide
  source 1..708: mol_type = other DNA

SEQ ID NO: 5433 - protein, 114 aa, Homo sapiens; identical to SEQ ID NO: 718

SEQ ID NO: 5434 - DNA, 345 bp, Homo sapiens; identical to SEQ ID NO: 168
  source 1..345: mol_type = other DNA

SEQ ID NO: 5435 - DNA, 345 bp, synthetic construct; identical to SEQ ID NO: 1617
  misc_feature 1..345: note = Description of Artificial Sequence: Synthetic construct
  source 1..345: mol_type = other DNA

SEQ ID NO: 5436 - DNA, 345 bp, synthetic construct; identical to SEQ ID NO: 1618
  misc_feature 1..345: note = Description of Artificial Sequence: Synthetic construct
  source 1..345: mol_type = other DNA

SEQ ID NO: 5437 - DNA, 342 bp, synthetic construct; identical to SEQ ID NO: 1619
  misc_feature 1..342: note = Description of Artificial Sequence: Synthetic construct
  source 1..342: mol_type = other DNA

SEQ ID NO: 5438 - DNA, 342 bp, synthetic construct; identical to SEQ ID NO: 1620
  misc_feature 1..342: note = Description of Artificial Sequence: Synthetic construct
  source 1..342: mol_type = other DNA

SEQ ID NO: 5439 - DNA, 342 bp, synthetic construct; identical to SEQ ID NO: 1902
  misc_feature 1..342: note = Description of Artificial Sequence: Synthetic construct
  source 1..342: mol_type = other DNA

SEQ ID NO: 5440 - DNA, 474 bp, synthetic construct; identical to SEQ ID NO: 1676
  misc_feature 1..474: note = Description of Artificial Sequence: Synthetic destabilizing domain (DD)
  source 1..474: mol_type = other DNA

SEQ ID NO: 5441 - DNA, 474 bp, synthetic construct; identical to SEQ ID NO: 1678
  misc_feature 1..474: note = Description of Artificial Sequence: Synthetic destabilizing domain (DD)
  source 1..474: mol_type = other DNA

SEQ ID NO: 5442 - DNA, 477 bp, synthetic construct; identical to SEQ ID NO: 1677
  misc_feature 1..477: note = Description of Artificial Sequence: Synthetic destabilizing domain (DD)
  source 1..477: mol_type = other DNA

SEQ ID NO: 5443 - DNA, 558 bp, synthetic construct; identical to SEQ ID NO: 1685
  misc_feature 1..558: note = Description of Artificial Sequence: Synthetic destabilizing domain (DD)
  source 1..558: mol_type = other DNA

SEQ ID NO: 5444 - DNA, 405 bp, synthetic construct; identical to SEQ ID NO: 1857
  misc_feature 1..405: note = Description of Artificial Sequence: Synthetic polynucleotide
  source 1..405: mol_type = other DNA

SEQ ID NO: 5445 - DNA, 912 bp, synthetic construct; identical to SEQ ID NO: 1859
  misc_feature 1..912: note = Description of Artificial Sequence: Synthetic polynucleotide
  source 1..912: mol_type = other DNA

SEQ ID NO: 5446 - DNA, 432 bp, synthetic construct; identical to SEQ ID NO: 1861
  misc_feature 1..432: note = Description of Artificial Sequence: Synthetic polynucleotide
  source 1..432: mol_type = other DNA

SEQ ID NO: 5447 - DNA, 1170 bp, synthetic construct; identical to SEQ ID NO: 1863
  misc_feature 1..1170: note = Description of Artificial Sequence: Synthetic polynucleotide
  source 1..1170: mol_type = other DNA

SEQ ID NO: 5448 - DNA, 1734 bp, synthetic construct; identical to SEQ ID NO: 1865
  misc_feature 1..1734: note = Description of Artificial Sequence: Synthetic polynucleotide
  source 1..1734: mol_type = other DNA

SEQ ID NO: 5449 - protein, 61 aa, Homo sapiens; identical to SEQ ID NO: 723

SEQ ID NO: 5450 - protein, 237 aa, Homo sapiens; identical to SEQ ID NO: 724

SEQ ID NO: 5451 - protein, 175 aa, Homo sapiens; identical to SEQ ID NO: 725

SEQ ID NO: 5452 - DNA, 90 bp, synthetic construct; identical to SEQ ID NO: 1724
  misc_feature 1..90: note = Description of Artificial Sequence: Synthetic construct
  source 1..90: mol_type = other DNA

SEQ ID NO: 5453 - DNA, 78 bp, synthetic construct; identical to SEQ ID NO: 1647
  misc_feature 1..78: note = Description of Artificial Sequence: Synthetic linker sequence
  source 1..78: mol_type = other DNA

SEQ ID NO: 5454 - DNA, 78 bp, synthetic construct; identical to SEQ ID NO: 1648
  misc_feature 1..78: note = Description of Artificial Sequence: Synthetic linker sequence
  source 1..78: mol_type = other DNA

SEQ ID NO: 5455 - DNA, 78 bp, synthetic construct; identical to SEQ ID NO: 1649
  misc_feature 1..78: note = Description of Artificial Sequence: Synthetic linker sequence
  source 1..78: mol_type = other DNA

SEQ ID NO: 5456 - DNA, 78 bp, synthetic construct; identical to SEQ ID NO: 1650
  misc_feature 1..78: note = Description of Artificial Sequence: Synthetic linker sequence
  source 1..78: mol_type = other DNA

SEQ ID NO: 5457 - DNA, 78 bp, synthetic construct; identical to SEQ ID NO: 1651
  misc_feature 1..78: note = Description of Artificial Sequence: Synthetic linker sequence
  source 1..78: mol_type = other DNA

SEQ ID NO: 5458 - DNA, 78 bp, synthetic construct; identical to SEQ ID NO: 1652
  misc_feature 1..78: note = Description of Artificial Sequence: Synthetic linker sequence
  source 1..78: mol_type = other DNA

SEQ ID NO: 5459 - DNA, 78 bp, synthetic construct; identical to SEQ ID NO: 1650
  misc_feature 1..78: note = Description of Artificial Sequence: Synthetic linker sequence
  source 1..78: mol_type = other DNA

SEQ ID NO: 5460 - DNA, 15 bp, synthetic construct
  misc_feature 1..15: note = Description of Artificial Sequence: Synthetic linker sequence
  source 1..15: mol_type = other DNA
tcaggtggcggtagt

SEQ ID NO: 5461 - DNA, 15 bp, synthetic construct
  misc_feature 1..15: note = Description of Artificial Sequence: Synthetic linker sequence
  source 1..15: mol_type = other DNA
agcggcggtggcagc

SEQ ID NO: 5462 - DNA, 15 bp, synthetic construct
  misc_feature 1..15: note = Description of Artificial Sequence: Synthetic linker sequence
  source 1..15: mol_type = other DNA
tcaggcggggggagt

SEQ ID NO: 5463 - DNA, 102 bp, synthetic construct; identical to SEQ ID NO: 1925
  misc_feature 1..102: note = Description of Artificial Sequence: Synthetic linker sequence
  source 1..102: mol_type = other DNA

SEQ ID NO: 5464 - DNA, 60 bp, synthetic construct; identical to SEQ ID NO: 1927
  misc_feature 1..60: note = Description of Artificial Sequence: Synthetic linker sequence
  source 1..60: mol_type = other DNA

SEQ ID NO: 5465 - DNA, 28 bp, synthetic construct
  misc_feature 1..28: note = Description of Artificial Sequence: Synthetic spacer
  source 1..28: mol_type = other DNA
tctagataatacgactcactagagatcc

SEQ ID NO: 5466 - DNA, 16 bp, synthetic construct
  misc_feature 1..16: note = Description of Artificial Sequence: Synthetic spacer
  source 1..16: mol_type = other DNA
tatggccacaaccatg

SEQ ID NO: 5467 - DNA, 30 bp, synthetic construct; identical to SEQ ID NO: 1934
  misc_feature 1..30: note = Description of Artificial Sequence: Synthetic spacer
  source 1..30: mol_type = other DNA

SEQ ID NO: 5468 - DNA, 711 bp, synthetic construct; identical to SEQ ID NO: 1624
  misc_feature 1..711: note = Description of Artificial Sequence: Synthetic payload
  source 1..711: mol_type = other DNA

SEQ ID NO: 5469 - DNA, 525 bp, synthetic construct; identical to SEQ ID NO: 1938
  misc_feature 1..525: note = Description of Artificial Sequence: Synthetic construct
  source 1..525: mol_type = other DNA

SEQ ID NO: 5470 - DNA, 708 bp, synthetic construct; identical to SEQ ID NO: 1940
  misc_feature 1..708: note = Description of Artificial Sequence: Synthetic construct
  source 1..708: mol_type = other DNA

SEQ ID NO: 5471 - DNA, 477 bp, synthetic construct; identical to SEQ ID NO: 1682
  misc_feature 1..477: note = Description of Artificial Sequence: Synthetic destabilizing domain (DD)
  source 1..477: mol_type = other DNA

SEQ ID NO: 5472 - DNA, 474 bp, synthetic construct; identical to SEQ ID NO: 1683
  misc_feature 1..474: note = Description of Artificial Sequence: Synthetic destabilizing domain (DD)
  source 1..474: mol_type = other DNA

SEQ ID NO: 5473 - DNA, 474 bp, synthetic construct; identical to SEQ ID NO: 1684
  misc_feature 1..474: note = Description of Artificial Sequence: Synthetic destabilizing domain (DD)
  source 1..474: mol_type = other DNA

SEQ ID NO: 5474 - DNA, 561 bp, synthetic construct; identical to SEQ ID NO: 77
  misc_feature 1..561: note = Description of Artificial Sequence: Synthetic destabilizing domain (DD)
  source 1..561: mol_type = other DNA

SEQ ID NO: 5475 - DNA, 561 bp, synthetic construct; identical to SEQ ID NO: 1688
  misc_feature 1..561: note = Description of Artificial Sequence: Synthetic destabilizing domain (DD)
  source 1..561: mol_type = other DNA

SEQ ID NO: 5476 - DNA, 558 bp, synthetic construct; identical to SEQ ID NO: 1689
  misc_feature 1..558: note = Description of Artificial Sequence: Synthetic destabilizing domain (DD)
  source 1..558: mol_type = other DNA

SEQ ID NO: 5477 - DNA, 558 bp, synthetic construct; identical to SEQ ID NO: 1690
  misc_feature 1..558: note = Description of Artificial Sequence: Synthetic destabilizing domain (DD)
  source 1..558: mol_type = other DNA

SEQ ID NO: 5478 - DNA, 561 bp, synthetic construct; identical to SEQ ID NO: 85
  misc_feature 1..561: note = Description of Artificial Sequence: Synthetic destabilizing domain (DD)
  source 1..561: mol_type = other DNA

SEQ ID NO: 5479 - DNA, 561 bp, synthetic construct; identical to SEQ ID NO: 1694
  misc_feature 1..561: note = Description of Artificial Sequence: Synthetic destabilizing domain (DD)
  source 1..561: mol_type = other DNA

SEQ ID NO: 5480 - DNA, 558 bp, synthetic construct; identical to SEQ ID NO: 1695
  misc_feature 1..558: note = Description of Artificial Sequence: Synthetic destabilizing domain (DD)
  source 1..558: mol_type = other DNA

SEQ ID NO: 5481 - DNA, 558 bp, synthetic construct; identical to SEQ ID NO: 1696
  misc_feature 1..558: note = Description of Artificial Sequence: Synthetic destabilizing domain (DD)
  source 1..558: mol_type = other DNA

SEQ ID NO: 5482 - DNA, 558 bp, synthetic construct; identical to SEQ ID NO: 1943
  misc_feature 1..558: note = Description of Artificial Sequence: Synthetic destabilizing domain (DD)
  source 1..558: mol_type = other DNA

SEQ ID NO: 5483 - DNA, 561 bp, synthetic construct; identical to SEQ ID NO: 1944
  misc_feature 1..561: note = Description of Artificial Sequence: Synthetic destabilizing domain (DD)
  source 1..561: mol_type = other DNA

SEQ ID NO: 5484 - DNA, 561 bp, synthetic construct; identical to SEQ ID NO: 1944
  misc_feature 1..561: note = Description of Artificial Sequence: Synthetic destabilizing domain (DD)
  source 1..561: mol_type = other DNA

SEQ ID NO: 5485 - DNA, 558 bp, synthetic construct; identical to SEQ ID NO: 1946
  misc_feature 1..558: note = Description of Artificial Sequence: Synthetic destabilizing domain (DD)
  source 1..558: mol_type = other DNA

SEQ ID NO: 5486 - DNA, 558 bp, synthetic construct; identical to SEQ ID NO: 126
  misc_feature 1..558: note = Description of Artificial Sequence: Synthetic destabilizing domain (DD)
  source 1..558: mol_type = other DNA

SEQ ID NO: 5487 - DNA, 558 bp, synthetic construct; identical to SEQ ID NO: 1948
  misc_feature 1..558: note = Description of Artificial Sequence: Synthetic destabilizing domain (DD)
  source 1..558: mol_type = other DNA

SEQ ID NO: 5488 - DNA, 1668 bp, synthetic construct; identical to SEQ ID NO: 2107
  misc_feature 1..1668: note = Description of Artificial Sequence: Synthetic polynucleotide
  source 1..1668: mol_type = other DNA

SEQ ID NO: 5489 - DNA, 1515 bp, synthetic construct; identical to SEQ ID NO: 1952
  misc_feature 1..1515: note = Description of Artificial Sequence: Synthetic polynucleotide
  source 1..1515: mol_type = other DNA

SEQ ID NO: 5490 - DNA, 1188 bp, synthetic construct; identical to SEQ ID NO: 169
  misc_feature 1..1188: note = Description of Artificial Sequence: Synthetic polynucleotide
  source 1..1188: mol_type = other DNA

SEQ ID NO: 5491 - DNA, 1668 bp, synthetic construct; identical to SEQ ID NO: 1956
  misc_feature 1..1668: note = Description of Artificial Sequence: Synthetic polynucleotide
  source 1..1668: mol_type = other DNA

SEQ ID NO: 5492 - DNA, 1752 bp, synthetic construct; identical to SEQ ID NO: 170
  misc_feature 1..1752: note = Description of Artificial Sequence: Synthetic polynucleotide
  source 1..1752: mol_type = other DNA

SEQ ID NO: 5493 - DNA, 1752 bp, synthetic construct; identical to SEQ ID NO: 171
  misc_feature 1..1752: note = Description of Artificial Sequence: Synthetic polynucleotide
  source 1..1752: mol_type = other DNA

SEQ ID NO: 5494 - DNA, 1224 bp, synthetic construct; identical to SEQ ID NO: 1982
  misc_feature 1..1224: note = Description of Artificial Sequence: Synthetic construct
  source 1..1224: mol_type = other DNA

SEQ ID NO: 5495 - DNA, 1752 bp, synthetic construct; identical to SEQ ID NO: 1964
  misc_feature 1..1752: note = Description of Artificial Sequence: Synthetic construct
  source 1..1752: mol_type = other DNA

SEQ ID NO: 5496 - DNA, 1752 bp, synthetic construct; identical to SEQ ID NO: 1966
  misc_feature 1..1752: note = Description of Artificial Sequence: Synthetic construct
  source 1..1752: mol_type = other DNA

SEQ ID NO: 5497 - DNA, 1215 bp, synthetic construct; identical to SEQ ID NO: 1968
  misc_feature 1..1215: note = Description of Artificial Sequence: Synthetic construct
  source 1..1215: mol_type = other DNA

SEQ ID NO: 5498 - DNA, 1212 bp, synthetic construct; identical to SEQ ID NO: 1970
  misc_feature 1..1212: note = Description of Artificial Sequence: Synthetic construct
  source 1..1212: mol_type = other DNA

SEQ ID NO: 5499 - DNA, 1212 bp, synthetic construct; identical to SEQ ID NO: 1972
  misc_feature 1..1212: note = Description of Artificial Sequence: Synthetic construct
  source 1..1212: mol_type = other DNA

SEQ ID NO: 5500 - DNA, 1116 bp, synthetic construct; identical to SEQ ID NO: 1974
  misc_feature 1..1116: note = Description of Artificial Sequence: Synthetic construct
  source 1..1116: mol_type = other DNA

SEQ ID NO: 5501 - DNA, 1224 bp, synthetic construct; identical to SEQ ID NO: 1976
  misc_feature 1..1224: note = Description of Artificial Sequence: Synthetic construct
  source 1..1224: mol_type = other DNA

SEQ ID NO: 5502 - DNA, 1194 bp, synthetic construct; identical to SEQ ID NO: 1978
  misc_feature 1..1194: note = Description of Artificial Sequence: Synthetic construct
  source 1..1194: mol_type = other DNA

SEQ ID NO: 5503 - DNA, 1668 bp, synthetic construct; identical to SEQ ID NO: 1980
  misc_feature 1..1668: note = Description of Artificial Sequence: Synthetic construct
  source 1..1668: mol_type = other DNA

SEQ ID NO: 5504 - DNA, 1188 bp, synthetic construct; identical to SEQ ID NO: 169
  misc_feature 1..1188: note = Description of Artificial Sequence: Synthetic polynucleotide
  source 1..1188: mol_type = other DNA

SEQ ID NO: 5505 - DNA, 1722 bp, synthetic construct; identical to SEQ ID NO: 1985
  misc_feature 1..1722: note = Description of Artificial Sequence: Synthetic construct
  source 1..1722: mol_type = other DNA

SEQ ID NO: 5506 - DNA, 1245 bp, synthetic construct; identical to SEQ ID NO: 1987
  misc_feature 1..1245: note = Description of Artificial Sequence: Synthetic construct
  source 1..1245: mol_type = other DNA

SEQ ID NO: 5507 - DNA, 1806 bp, synthetic construct; identical to SEQ ID NO: 1989
  misc_feature 1..1806: note = Description of Artificial Sequence: Synthetic construct
  source 1..1806: mol_type = other DNA

SEQ ID NO: 5508 - DNA, 1806 bp, synthetic construct; identical to SEQ ID NO: 1991
  misc_feature 1..1806: note = Description of Artificial Sequence: Synthetic construct
  source 1..1806: mol_type = other DNA

SEQ ID NO: 5509 - DNA, 1806 bp, synthetic construct; identical to SEQ ID NO: 1993
  misc_feature 1..1806: note = Description of Artificial Sequence: Synthetic construct
  source 1..1806: mol_type = other DNA

SEQ ID NO: 5510 - DNA, 1806 bp, synthetic construct; identical to SEQ ID NO: 1995
  misc_feature 1..1806: note = Description of Artificial Sequence: Synthetic construct
  source 1..1806: mol_type = other DNA

SEQ ID NO: 5511 - DNA, 1806 bp, synthetic construct; identical to SEQ ID NO: 1997
  misc_feature 1..1806: note = Description of Artificial Sequence: Synthetic construct
  source 1..1806: mol_type = other DNA

SEQ ID NO: 5512 - DNA, 1806 bp, synthetic construct; identical to SEQ ID NO: 1999
  misc_feature 1..1806: note = Description of Artificial Sequence: Synthetic construct
  source 1..1806: mol_type = other DNA

SEQ ID NO: 5513 - DNA, 2046 bp, synthetic construct; identical to SEQ ID NO: 2001
  misc_feature 1..2046: note = Description of Artificial Sequence: Synthetic construct
  source 1..2046: mol_type = other DNA

SEQ ID NO: 5514 - DNA, 1959 bp, synthetic construct; identical to SEQ ID NO: 2003
  misc_feature 1..1959: note = Description of Artificial Sequence: Synthetic construct
  source 1..1959: mol_type = other DNA

SEQ ID NO: 5515 - DNA, 2291 bp, synthetic construct; identical to SEQ ID NO: 2020
  misc_feature 1..2291: note = Description of Artificial Sequence: Synthetic construct
  source 1..2291: mol_type = other DNA

SEQ ID NO: 5516 - DNA, 963 bp, synthetic construct; identical to SEQ ID NO: 2022
  misc_feature 1..963: note = Description of Artificial Sequence: Synthetic construct
  source 1..963: mol_type = other DNA

SEQ ID NO: 5517 - DNA, 708 bp, synthetic construct; identical to SEQ ID NO: 1940
  misc_feature 1..708: note = Description of Artificial Sequence: Synthetic construct
  source 1..708: mol_type = other DNA

SEQ ID NO: 5518 - DNA, 1735 bp, synthetic construct; identical to SEQ ID NO: 2035
  misc_feature 1..1735: note = Description of Artificial Sequence: Synthetic construct
  source 1..1735: mol_type = other DNA

SEQ ID NO: 5519 - DNA, 405 bp, synthetic construct; identical to SEQ ID NO: 2037
  misc_feature 1..405: note = Description of Artificial Sequence: Synthetic construct
  source 1..405: mol_type = other DNA

SEQ ID NO: 5520 - DNA, 708 bp, synthetic construct; identical to SEQ ID NO: 1940
  misc_feature 1..708: note = Description of Artificial Sequence: Synthetic construct
  source 1..708: mol_type = other DNA

SEQ ID NO: 5521 - DNA, 90 bp, synthetic construct; identical to SEQ ID NO: 1724
  misc_feature 1..90: note = Description of Artificial Sequence: Synthetic signal sequence
  source 1..90: mol_type = other DNA

SEQ ID NO: 5522 - DNA, 78 bp, synthetic construct; identical to SEQ ID NO: 1647
  misc_feature 1..78: note = Description of Artificial Sequence: Synthetic linker sequence
  source 1..78: mol_type = other DNA

SEQ ID NO: 5523 - DNA, 78 bp, synthetic construct; identical to SEQ ID NO: 1649
  misc_feature 1..78: note = Description of Artificial Sequence: Synthetic linker
  source 1..78: mol_type = other DNA

SEQ ID NO: 5524 - DNA, 78 bp, synthetic construct; identical to SEQ ID NO: 1650
  misc_feature 1..78: note = Description of Artificial Sequence: Synthetic linker
  source 1..78: mol_type = other DNA

SEQ ID NO: 5525 - DNA, 78 bp, synthetic construct; identical to SEQ ID NO: 1651
  misc_feature 1..78: note = Description of Artificial Sequence: Synthetic linker
  source 1..78: mol_type = other DNA

SEQ ID NO: 5526 - DNA, 78 bp, synthetic construct; identical to SEQ ID NO: 1652
  misc_feature 1..78: note = Description of Artificial Sequence: Synthetic linker
  source 1..78: mol_type = other DNA

SEQ ID NO: 5527 - DNA, 15 bp, synthetic construct
  misc_feature 1..15: note = Description of Artificial Sequence: Synthetic linker
  source 1..15: mol_type = other DNA
tcaggtggcggtagt

SEQ ID NO: 5528 - DNA, 15 bp, synthetic construct
  misc_feature 1..15: note = Description of Artificial Sequence: Synthetic linker
  source 1..15: mol_type = other DNA
agcggcggtggcagc

SEQ ID NO: 5529 - DNA, 15 bp, synthetic construct
  misc_feature 1..15: note = Description of Artificial Sequence: Synthetic linker
  source 1..15: mol_type = other DNA
tcaggcggggggagt

SEQ ID NO: 5530 - DNA, 102 bp, synthetic construct; identical to SEQ ID NO: 1925
  misc_feature 1..102: note = Description of Artificial Sequence: Synthetic linker
  source 1..102: mol_type = other DNA

SEQ ID NO: 5531 - DNA, 60 bp, synthetic construct; identical to SEQ ID NO: 1927
  misc_feature 1..60: note = Description of Artificial Sequence: Synthetic linker
  source 1..60: mol_type = other DNA

SEQ ID NO: 5532 - DNA, 28 bp, synthetic construct
  misc_feature 1..28: note = Description of Artificial Sequence: Synthetic spacer sequence
  source 1..28: mol_type = other DNA
tctagataatacgactcactagagatcc

SEQ ID NO: 5533 - DNA, 16 bp, synthetic construct
  misc_feature 1..16: note = Description of Artificial Sequence: Synthetic spacer sequence
  source 1..16: mol_type = other DNA
tatggccacaaccatg

SEQ ID NO: 5534 - DNA, 30 bp, synthetic construct; identical to SEQ ID NO: 1934
  misc_feature 1..30: note = Description of Artificial Sequence: Synthetic spacer sequence
  source 1..30: mol_type = other DNA

SEQ ID NO: 5535 - DNA, 207 bp, Homo sapiens; identical to SEQ ID NO: 1549
  source 1..207: mol_type = other DNA

SEQ ID NO: 5536 - DNA, 714 bp, Homo sapiens; identical to SEQ ID NO: 1622
  source 1..714: mol_type = other DNA

SEQ ID NO: 5537 - DNA, 711 bp, synthetic construct; identical to SEQ ID NO: 1623
  misc_feature 1..711: note = Description of Artificial Sequence: Synthetic construct
  source 1..711: mol_type = other DNA

SEQ ID NO: 5538 - DNA, 711 bp, synthetic construct; identical to SEQ ID NO: 2068
  misc_feature 1..711: note = Description of Artificial Sequence: Synthetic construct
  source 1..711: mol_type = other DNA

SEQ ID NO: 5539 - DNA, 711 bp, synthetic construct; identical to SEQ ID NO: 1624
  misc_feature 1..711: note = Description of Artificial Sequence: Synthetic construct
  source 1..711: mol_type = other DNA

SEQ ID NO: 5540 - DNA, 711 bp, synthetic construct; identical to SEQ ID NO: 2070
  misc_feature 1..711: note = Description of Artificial Sequence: Synthetic construct
  source 1..711: mol_type = other DNA

SEQ ID NO: 5541 - DNA, 525 bp, synthetic construct; identical to SEQ ID NO: 1938
  misc_feature 1..525: note = Description of Artificial Sequence: Synthetic construct
  source 1..525: mol_type = other DNA

SEQ ID NO: 5542 - DNA, 708 bp, synthetic construct; identical to SEQ ID NO: 1940
  misc_feature 1..708: note = Description of Artificial Sequence: Synthetic construct
  source 1..708: mol_type = other DNA

SEQ ID NO: 5543 - DNA, 24 bp, synthetic construct
  misc_feature 1..24: note = Description of Artificial Sequence: Synthetic FLAG
  source 1..24: mol_type = other DNA
gactacaaagacgatgacgacaag

SEQ ID NO: 5544 - DNA, 477 bp, synthetic construct; identical to SEQ ID NO: 1682
  misc_feature 1..477: note = Description of Artificial Sequence: Synthetic destabilizing domain (DD)
  source 1..477: mol_type = other DNA

SEQ ID NO: 5545 - DNA, 474 bp, synthetic construct; identical to SEQ ID NO: 1683
  misc_feature 1..474: note = Description of Artificial Sequence: Synthetic destabilizing domain (DD)
  source 1..474: mol_type = other DNA

SEQ ID NO: 5546 - DNA, 324 bp, synthetic construct; identical to SEQ ID NO: 1669
  misc_feature 1..324: note = Description of Artificial Sequence: Synthetic destabilizing domain (DD)
  source 1..324: mol_type = other DNA

SEQ ID NO: 5547 - DNA, 324 bp, synthetic construct; identical to SEQ ID NO: 1670
  misc_feature 1..324: note = Description of Artificial Sequence: Synthetic destabilizing domain (DD)
  source 1..324: mol_type = other DNA

SEQ ID NO: 5548 - DNA, 324 bp, synthetic construct; identical to SEQ ID NO: 1671
  misc_feature 1..324: note = Description of Artificial Sequence: Synthetic destabilizing domain (DD)
  source 1..324: mol_type = other DNA

SEQ ID NO: 5549 - DNA, 324 bp, synthetic construct; identical to SEQ ID NO: 1672
  misc_feature 1..324: note = Description of Artificial Sequence: Synthetic destabilizing domain (DD)
  source 1..324: mol_type = other DNA

SEQ ID NO: 5550 - DNA, 561 bp, synthetic construct; identical to SEQ ID NO: 77
  misc_feature 1..561: note = Description of Artificial Sequence: Synthetic destabilizing domain (DD)
  source 1..561: mol_type = other DNA

SEQ ID NO: 5551 - DNA, 558 bp, synthetic construct; identical to SEQ ID NO: 1689
  misc_feature 1..558: note = Description of Artificial Sequence: Synthetic destabilizing domain (DD)
  source 1..558: mol_type = other DNA

SEQ ID NO: 5552 - DNA, 561 bp, synthetic construct; identical to SEQ ID NO: 1688
  misc_feature 1..561: note = Description of Artificial Sequence: Synthetic destabilizing domain (DD)
  source 1..561: mol_type = other DNA

SEQ ID NO: 5553 - DNA, 561 bp, synthetic construct; identical to SEQ ID NO: 85
  misc_feature 1..561: note = Description of Artificial Sequence: Synthetic destabilizing domain (DD)
  source 1..561: mol_type = other DNA

SEQ ID NO: 5554 - DNA, 558 bp, synthetic construct; identical to SEQ ID NO: 1695
  misc_feature 1..558: note = Description of Artificial Sequence: Synthetic destabilizing domain (DD)
  source 1..558: mol_type = other DNA

SEQ ID NO: 5555 - DNA, 561 bp, synthetic construct; identical to SEQ ID NO: 1694
  misc_feature 1..561: note = Description of Artificial Sequence: Synthetic destabilizing domain (DD)
  source 1..561: mol_type = other DNA

SEQ ID NO: 5556 - DNA, 558 bp, synthetic construct; identical to SEQ ID NO: 1943
  misc_feature 1..558: note = Description of Artificial Sequence: Synthetic destabilizing domain (DD)
  source 1..558: mol_type = other DNA

SEQ ID NO: 5557 - DNA, 561 bp, synthetic construct; identical to SEQ ID NO: 1944
  misc_feature 1..561: note = Description of Artificial Sequence: Synthetic destabilizing domain (DD)
  source 1..561: mol_type = other DNA

SEQ ID NO: 5558 - DNA, 561 bp, synthetic construct; identical to SEQ ID NO: 1944
  misc_feature 1..561: note = Description of Artificial Sequence: Synthetic destabilizing domain (DD)
  source 1..561: mol_type = other DNA

SEQ ID NO: 5559 - DNA, 558 bp, synthetic construct; identical to SEQ ID NO: 1946
  misc_feature 1..558: note = Description of Artificial Sequence: Synthetic destabilizing domain (DD)
  source 1..558: mol_type = other DNA

SEQ ID NO: 5560 - DNA, 558 bp, synthetic construct; identical to SEQ ID NO: 1820
  misc_feature 1..558: note = Description of Artificial Sequence: Synthetic destabilizing domain (DD)
  source 1..558: mol_type = other DNA

SEQ ID NO: 5561 - DNA, 558 bp, synthetic construct; identical to SEQ ID NO: 126
  misc_feature 1..558: note = Description of Artificial Sequence: Synthetic destabilizing domain (DD)
  source 1..558: mol_type = other DNA

SEQ ID NO: 5562 - DNA, 558 bp, synthetic construct; identical to SEQ ID NO: 1948
  misc_feature 1..558: note = Description of Artificial Sequence: Synthetic destabilizing domain (DD)
  source 1..558: mol_type = other DNA

SEQ ID NO: 5563 - DNA, 1668 bp, synthetic construct; identical to SEQ ID NO: 2107
  misc_feature 1..1668: note = Description of Artificial Sequence: Synthetic polynucleotide
  source 1..1668: mol_type = other DNA

SEQ ID NO: 5564 - DNA, 1515 bp, synthetic construct; identical to SEQ ID NO: 1952
  misc_feature 1..1515: note = Description of Artificial Sequence: Synthetic polynucleotide
  source 1..1515: mol_type = other DNA

SEQ ID NO: 5565 - DNA, 1188 bp, synthetic construct; identical to SEQ ID NO: 169
  misc_feature 1..1188: note = Description of Artificial Sequence: Synthetic polynucleotide
  source 1..1188: mol_type = other DNA

SEQ ID NO: 5566 - DNA, 1668 bp, synthetic construct; identical to SEQ ID NO: 1956
  misc_feature 1..1668: note = Description of Artificial Sequence: Synthetic polynucleotide
  source 1..1668: mol_type = other DNA

SEQ ID NO: 5567 - DNA, 1752 bp, synthetic construct; identical to SEQ ID NO: 170
  misc_feature 1..1752: note = Description of Artificial Sequence: Synthetic polynucleotide
  source 1..1752: mol_type = other DNA

SEQ ID NO: 5568 - DNA, 1752 bp, synthetic construct; identical to SEQ ID NO: 171
  misc_feature 1..1752: note = Description of Artificial Sequence: Synthetic polynucleotide
  source 1..1752: mol_type = other DNA

SEQ ID NO: 5569 - DNA, 1752 bp, synthetic construct; identical to SEQ ID NO: 1962
  misc_feature 1..1752: note = Description of Artificial Sequence: Synthetic construct
  source 1..1752: mol_type = other DNA

SEQ ID NO: 5570 - DNA, 1752 bp, synthetic construct; identical to SEQ ID NO: 1964
  misc_feature 1..1752: note = Description of Artificial Sequence: Synthetic polynucleotide
  source 1..1752: mol_type = other DNA

SEQ ID NO: 5571 - DNA, 1752 bp, synthetic construct; identical to SEQ ID NO: 1966
  misc_feature 1..1752: note = Description of Artificial Sequence: Synthetic construct
  source 1..1752: mol_type = other DNA

SEQ ID NO: 5572 - DNA, 1215 bp, synthetic construct; identical to SEQ ID NO: 1968
  misc_feature 1..1215: note = Description of Artificial Sequence: Synthetic construct
  source 1..1215: mol_type = other DNA

SEQ ID NO: 5573 - DNA, 1212 bp, synthetic construct; identical to SEQ ID NO: 1970
  misc_feature 1..1212: note = Description of Artificial Sequence: Synthetic construct
  source 1..1212: mol_type = other DNA

SEQ ID NO: 5574 - DNA, 1212 bp, synthetic construct; identical to SEQ ID NO: 1972
  misc_feature 1..1212: note = Description of Artificial Sequence: Synthetic construct
  source 1..1212: mol_type = other DNA

SEQ ID NO: 5575 - DNA, 1116 bp, synthetic construct; identical to SEQ ID NO: 1974
  misc_feature 1..1116: note = Description of Artificial Sequence: Synthetic construct
  source 1..1116: mol_type = other DNA

SEQ ID NO: 5576 - DNA, 1224 bp, synthetic construct; identical to SEQ ID NO: 1976
  misc_feature 1..1224: note = Description of Artificial Sequence: Synthetic construct
  source 1..1224: mol_type = other DNA

SEQ ID NO: 5577 - DNA, 1194 bp, synthetic construct; identical to SEQ ID NO: 1978
  misc_feature 1..1194: note = Description of Artificial Sequence: Synthetic construct
  source 1..1194: mol_type = other DNA

SEQ ID NO: 5578 - DNA, 1668 bp, synthetic construct; identical to SEQ ID NO: 1980
  misc_feature 1..1668: note = Description of Artificial Sequence: Synthetic construct
  source 1..1668: mol_type = other DNA

SEQ ID NO: 5579 - DNA, 1224 bp, synthetic construct; identical to SEQ ID NO: 1976
  misc_feature 1..1224: note = Description of Artificial Sequence: Synthetic construct
  source 1..1224: mol_type = other DNA

SEQ ID NO: 5580 - DNA, 1116 bp, synthetic construct; identical to SEQ ID NO: 2141
  misc_feature 1..1116: note = Description of Artificial Sequence: Synthetic construct
  source 1..1116: mol_type = other DNA

SEQ ID NO: 5581 - DNA, 1224 bp, synthetic construct; identical to SEQ ID NO: 1982
  misc_feature 1..1224: note = Description of Artificial Sequence: Synthetic construct
  source 1..1224: mol_type = other DNA

SEQ ID NO: 5582 - DNA, 1188 bp, synthetic construct
  misc_feature 1..1188: note = Description of Artificial Sequence: Synthetic construct
  source 1..1188: mol_type = other DNA
atggactggacctggattctgtttctggtggccgctgccacaagagtgcacagcaattgggtcaacgtgatcagcgacctgaagaagatcgaggacctgatccagagcatgcacatcgacgccacactgtacaccgagtccgatgtgcaccctagctgcaaagtgaccgccatgaagtgctttctgctggaactgcaagtgatcagcctggaaagcggcgacgccagcatccacgataccgtggaaaatctgatcatcctggccaacaacagcctgagcagcaacggcaatgtgaccgagagcggctgcaaagagtgcgaggaactggaagagaagaacatcaaagagttcctccagagcttcgtccacatcgtgcagatgttcatcaacaccagctctggcggaggaagcggaggcggaggatctggtggtggtggatctggcggcggtggtagtggcggaggttctctgcaaatcacctgtcctccacctatgagcgtggaacacgccgacatctgggtcaagagctacagcctgtacagcagagagcggtacatctgcaacagcggcttcaagagaaaggccggcacaagcagcctgaccgagtgtgtgctgaacaaggccacaaacgtggcccactggaccacacctagcctgaagtgcatcagagatcccgctctggttcaccagaggcctgctcctccatctacagtgacaacagctggcgtgacccctcagcctgagtctctgtctccatctggaaaagagcctgccgccagctctcccagctctaacaatactgctgccaccacagccgccatcgtgcctggatctcagctgatgcctagcaagagccctagcaccggcacaacagagatcagctctcacgagtctagccacggcaccccatctcagaccacagccaagaattgggagctgaccgcctctgcctctcatcagccacctggtgtttaccctcaaggccactctgataccaccgtggccatcagcacaagcacagtgctgctgtgtggactgtctgccgtgtctctgctggcctgctacctgaagtctagacagacacctcctctggccagcgtggaaatggaagccatggaagctctgcctgtgacatggggcaccagcagcagagatgaggacctcgagaattgcagccaccacctgtag

SEQ ID NO: 5583 - DNA, 1722 bp, synthetic construct; identical to SEQ ID NO: 1985
  misc_feature 1..1722: note = Description of Artificial Sequence: Synthetic construct
  source 1..1722: mol_type = other DNA

SEQ ID NO: 5584 - DNA, 1245 bp, synthetic construct; identical to SEQ ID NO: 1987
  misc_feature 1..1245: note = Description of Artificial Sequence: Synthetic construct
  source 1..1245: mol_type = other DNA

SEQ ID NO: 5585 - DNA, 1806 bp, synthetic construct; identical to SEQ ID NO: 1989
  misc_feature 1..1806: note = Description of Artificial Sequence: Synthetic construct
  source 1..1806: mol_type = other DNA

SEQ ID NO: 5586 - DNA, 1806 bp, synthetic construct; identical to SEQ ID NO: 1991
  misc_feature 1..1806: note = Description of Artificial Sequence: Synthetic construct
  source 1..1806: mol_type = other DNA

SEQ ID NO: 5587 - DNA, 1806 bp, synthetic construct; identical to SEQ ID NO: 1993
  misc_feature 1..1806: note = Description of Artificial Sequence: Synthetic construct
  source 1..1806: mol_type = other DNA

SEQ ID NO: 5588 - DNA, 1806 bp, synthetic construct; identical to SEQ ID NO: 1995
  misc_feature 1..1806: note = Description of Artificial Sequence: Synthetic construct
  source 1..1806: mol_type = other DNA

SEQ ID NO: 5589 - DNA, 1806 bp, synthetic construct; identical to SEQ ID NO: 1997
  misc_feature 1..1806: note = Description of Artificial Sequence: Synthetic construct
  source 1..1806: mol_type = other DNA

SEQ ID NO: 5590 - DNA, 1806 bp, synthetic construct; identical to SEQ ID NO: 1999
  misc_feature 1..1806: note = Description of Artificial Sequence: Synthetic construct
  source 1..1806: mol_type = other DNA

SEQ ID NO: 5591 - DNA, 2046 bp, synthetic construct; identical to SEQ ID NO: 2001
  misc_feature 1..2046: note = Description of Artificial Sequence: Synthetic construct
  source 1..2046: mol_type = other DNA

SEQ ID NO: 5592 - DNA, 1959 bp, synthetic construct; identical to SEQ ID NO: 2003
  misc_feature 1..1959: note = Description of Artificial Sequence: Synthetic construct
  source 1..1959: mol_type = other DNA

SEQ ID NO: 5593 - DNA, 2291 bp, synthetic construct; identical to SEQ ID NO: 2020
  misc_feature 1..2291: note = Description of Artificial Sequence: Synthetic construct
  source 1..2291: mol_type = other DNA

SEQ ID NO: 5594 - DNA, 963 bp, synthetic construct; identical to SEQ ID NO: 2022
  misc_feature 1..963: note = Description of Artificial Sequence: Synthetic construct
  source 1..963: mol_type = other DNA

SEQ ID NO: 5595 - DNA, 708 bp, synthetic construct; identical to SEQ ID NO: 1940
  misc_feature 1..708: note = Description of Artificial Sequence: Synthetic construct
  source 1..708: mol_type = other DNA

SEQ ID NO: 5596 - DNA, 1735 bp, synthetic construct; identical to SEQ ID NO: 2035
  misc_feature 1..1735: note = Description of Artificial Sequence: Synthetic construct
  source 1..1735: mol_type = other DNA

SEQ ID NO: 5597 - DNA, 405 bp, synthetic construct; identical to SEQ ID NO: 2037
  misc_feature 1..405: note = Description of Artificial Sequence: Synthetic construct
  source 1..405: mol_type = other DNA

SEQ ID NO: 5598 - DNA, 60 bp, Homo sapiens; identical to SEQ ID NO: 1777
  source 1..60: mol_type = other DNA

SEQ ID NO: 5599 - DNA, 60 bp, synthetic construct; identical to SEQ ID NO: 1776
  misc_feature 1..60: note = Description of Artificial Sequence: Synthetic signal sequence
  source 1..60: mol_type = other DNA

SEQ ID NO: 5600 - DNA, 60 bp, synthetic construct; identical to SEQ ID NO: 1778
  misc_feature 1..60: note = Description of Artificial Sequence: Synthetic signal sequence
  source 1..60: mol_type = other DNA

SEQ ID NO: 5601 - DNA, 60 bp, synthetic construct; identical to SEQ ID NO: 1779
  misc_feature 1..60: note = Description of Artificial Sequence: Synthetic signal sequence
  source 1..60: mol_type = other DNA

SEQ ID NO: 5602 - DNA, 54 bp, Homo sapiens; identical to SEQ ID NO: 1850
  source 1..54: mol_type = other DNA

SEQ ID NO: 5603 - DNA, 345 bp, Homo sapiens; identical to SEQ ID NO: 168
  source 1..345: mol_type = other DNA

SEQ ID NO: 5604 - DNA, 342 bp, synthetic construct; identical to SEQ ID NO: 1619
  misc_feature 1..342: note = Description of Artificial Sequence: Synthetic construct
  source 1..342: mol_type = other DNA

SEQ ID NO: 5605 - DNA, 345 bp, synthetic construct; identical to SEQ ID NO: 1617
  misc_feature 1..345: note = Description of Artificial Sequence: Synthetic construct
  source 1..345: mol_type = other DNA

SEQ ID NO: 5606 - DNA, 345 bp, synthetic construct; identical to SEQ ID NO: 1618
  misc_feature 1..345: note = Description of Artificial Sequence: Synthetic construct
  source 1..345: mol_type = other DNA

SEQ ID NO: 5607 - DNA, 78 bp, synthetic construct; identical to SEQ ID NO: 1647
  misc_feature 1..78: note = Description of Artificial Sequence: Synthetic linker
  source 1..78: mol_type = other DNA

SEQ ID NO: 5608 - DNA, 561 bp, synthetic construct; identical to SEQ ID NO: 77
  misc_feature 1..561: note = Description of Artificial Sequence: Synthetic destabilizing domain (DD)
  source 1..561: mol_type = other DNA

SEQ ID NO: 5609 - DNA, 561 bp, synthetic construct; identical to SEQ ID NO: 85
  misc_feature 1..561: note = Description of Artificial Sequence: Synthetic destabilizing domain (DD)
  source 1..561: mol_type = other DNA

SEQ ID NO: 5610 - DNA, 1188 bp, synthetic construct; identical to SEQ ID NO: 169
  misc_feature 1..1188: note = Description of Artificial Sequence: Synthetic polynucleotide
  source 1..1188: mol_type = other DNA

SEQ ID NO: 5611 - DNA, 1752 bp, synthetic construct; identical to SEQ ID NO: 170
  misc_feature 1..1752: note = Description of Artificial Sequence: Synthetic polynucleotide
  source 1..1752: mol_type = other DNA

SEQ ID NO: 5612 - DNA, 1752 bp, synthetic construct; identical to SEQ ID NO: 171
  misc_feature 1..1752: note = Description of Artificial Sequence: Synthetic polynucleotide
  source 1..1752: mol_type = other DNA

SEQ ID NO: 5613 - protein, 187 aa, Homo sapiens; identical to SEQ ID NO: 1

SEQ ID NO: 5614 - DNA, 66 bp, Homo sapiens; identical to SEQ ID NO: 1580
  source 1..66: mol_type = other DNA

SEQ ID NO: 5615 - DNA, 66 bp, synthetic construct; identical to SEQ ID NO: 1581
  misc_feature 1..66: note = Description of Artificial Sequence: Synthetic signal sequence
  source 1..66: mol_type = other DNA

SEQ ID NO: 5616 - DNA, 66 bp, synthetic construct; identical to SEQ ID NO: 1582
  misc_feature 1..66: note = Description of Artificial Sequence: Synthetic signal sequence
  source 1..66: mol_type = other DNA

SEQ ID NO: 5617 - DNA, 66 bp, synthetic construct; identical to SEQ ID NO: 1583
  misc_feature 1..66: note = Description of Artificial Sequence: Synthetic signal sequence
  source 1..66: mol_type = other DNA

SEQ ID NO: 5618 - DNA, 66 bp, synthetic construct; identical to SEQ ID NO: 1584
  misc_feature 1..66: note = Description of Artificial Sequence: Synthetic signal sequence
  source 1..66: mol_type = other DNA

SEQ ID NO: 5619 - DNA, 66 bp, synthetic construct; identical to SEQ ID NO: 1585
  misc_feature 1..66: note = Description of Artificial Sequence: Synthetic signal sequence
  source 1..66: mol_type = other DNA

SEQ ID NO: 5620 - DNA, 66 bp, synthetic construct; identical to SEQ ID NO: 1586
  misc_feature 1..66: note = Description of Artificial Sequence: Synthetic signal sequence
  source 1..66: mol_type = other DNA

SEQ ID NO: 5621 - DNA, 66 bp, synthetic construct; identical to SEQ ID NO: 1587
  misc_feature 1..66: note = Description of Artificial Sequence: Synthetic signal sequence
  source 1..66: mol_type = other DNA

SEQ ID NO: 5622 - DNA, 66 bp, synthetic construct; identical to SEQ ID NO: 1588
  misc_feature 1..66: note = Description of Artificial Sequence: Synthetic signal sequence
  source 1..66: mol_type = other DNA

SEQ ID NO: 5623 - DNA, 45 bp, synthetic construct; identical to SEQ ID NO: 1636
  misc_feature 1..45: note = Description of Artificial Sequence: Synthetic linker
  source 1..45: mol_type = other DNA

SEQ ID NO: 5624 - DNA, 45 bp, synthetic construct; identical to SEQ ID NO: 1637
  misc_feature 1..45: note = Description of Artificial Sequence: Synthetic linker
  source 1..45: mol_type = other DNA

SEQ ID NO: 5625 - DNA, 45 bp, synthetic construct; identical to SEQ ID NO: 1638
  misc_feature 1..45: note = Description of Artificial Sequence: Synthetic linker
  source 1..45: mol_type = other DNA

SEQ ID NO: 5626 - DNA, 45 bp, synthetic construct; identical to SEQ ID NO: 1639
  misc_feature 1..45: note = Description of Artificial Sequence: Synthetic linker
  source 1..45: mol_type = other DNA

SEQ ID NO: 5627 - DNA, 45 bp, synthetic construct; identical to SEQ ID NO: 1640
  misc_feature 1..45: note = Description of Artificial Sequence: Synthetic linker
  source 1..45: mol_type = other DNA

SEQ ID NO: 5628 - DNA, 45 bp, synthetic construct; identical to SEQ ID NO: 1641
  misc_feature 1..45: note = Description of Artificial Sequence: Synthetic linker
  source 1..45: mol_type = other DNA

SEQ ID NO: 5629 - DNA, 36 bp, synthetic construct; identical to SEQ ID NO: 1337
  misc_feature 1..36: note = Description of Artificial Sequence: Synthetic cleavage site
  source 1..36: mol_type = other DNA

SEQ ID NO: 5630 - DNA, 36 bp, synthetic construct; identical to SEQ ID NO: 1338
  misc_feature 1..36: note = Description of Artificial Sequence: Synthetic cleavage site
  source 1..36: mol_type = other DNA

SEQ ID NO: 5631 - DNA, 36 bp, synthetic construct; identical to SEQ ID NO: 1339
  misc_feature 1..36: note = Description of Artificial Sequence: Synthetic cleavage site
  source 1..36: mol_type = other DNA

SEQ ID NO: 5632 - DNA, 921 bp, Homo sapiens; identical to SEQ ID NO: 1593
  source 1..921: mol_type = other DNA

SEQ ID NO: 5633 - DNA, 918 bp, synthetic construct; identical to SEQ ID NO: 1594
  misc_feature 1..918: note = Description of Artificial Sequence: Synthetic construct
  source 1..918: mol_type = other DNA

SEQ ID NO: 5634 - DNA, 918 bp, synthetic construct; identical to SEQ ID NO: 1595
  misc_feature 1..918: note = Description of Artificial Sequence: Synthetic construct
  source 1..918: mol_type = other DNA

SEQ ID NO: 5635 - DNA, 918 bp, synthetic construct; identical to SEQ ID NO: 1596
  misc_feature 1..918: note = Description of Artificial Sequence: Synthetic construct
  source 1..918: mol_type = other DNA

SEQ ID NO: 5636 - DNA, 918 bp, synthetic construct; identical to SEQ ID NO: 1597
  misc_feature 1..918: note = Description of Artificial Sequence: Synthetic construct
  source 1..918: mol_type = other DNA

SEQ ID NO: 5637 - DNA, 918 bp, synthetic construct; identical to SEQ ID NO: 1590
  misc_feature 1..918: note = Description of Artificial Sequence: Synthetic construct
  source 1..918: mol_type = other DNA

SEQ ID NO: 5638 - DNA, 918 bp, synthetic construct; identical to SEQ ID NO: 1591
  misc_feature 1..918: note = Description of Artificial Sequence: Synthetic construct
  source 1..918: mol_type = other DNA

SEQ ID NO: 5639 - DNA, 918 bp, synthetic construct; identical to SEQ ID NO: 1600
  misc_feature 1..918: note = Description of Artificial Sequence: Synthetic construct
  source 1..918: mol_type = other DNA

SEQ ID NO: 5640 - DNA, 918 bp, synthetic construct; identical to SEQ ID NO: 1601
  misc_feature 1..918: note = Description of Artificial Sequence: Synthetic construct
  source 1..918: mol_type = other DNA

SEQ ID NO: 5641 - DNA, 918 bp, synthetic construct; identical to SEQ ID NO: 1602
  misc_feature 1..918: note = Description of Artificial Sequence: Synthetic construct
  source 1..918: mol_type = other DNA

SEQ ID NO: 5642 - DNA, 591 bp, synthetic construct; identical to SEQ ID NO: 1613
  misc_feature 1..591: note = Description of Artificial Sequence: Synthetic construct
  source 1..591: mol_type = other DNA

SEQ ID NO: 5643 - DNA, 582 bp, Homo sapiens; identical to SEQ ID NO: 2257
  source 1..582: mol_type = other DNA

SEQ ID NO: 5644 - DNA, 558 bp, synthetic construct; identical to SEQ ID NO: 86
  misc_feature 1..558: note = Description of Artificial Sequence: Synthetic destabilizing domain (DD)
  source 1..558: mol_type = other DNA

SEQ ID NO: 5645 - DNA, 1623 bp, synthetic construct; identical to SEQ ID NO: 172
  misc_feature 1..1623: note = Description of Artificial Sequence: Synthetic polynucleotide
  source 1..1623: mol_type = other DNA

SEQ ID NO: 5646 - DNA, 2214 bp, synthetic construct; identical to SEQ ID NO: 173
  misc_feature 1..2214: note = Description of Artificial Sequence: Synthetic polynucleotide
  source 1..2214: mol_type = other DNA

SEQ ID NO: 5647 - DNA, 1251 bp, Homo sapiens; identical to SEQ ID NO: 2261
  source 1..1251: mol_type = other DNA

SEQ ID NO: 5648 - DNA, 1248 bp, Homo sapiens; identical to SEQ ID NO: 2263
  source 1..1248: mol_type = other DNA

SEQ ID NO: 5649 - DNA, 15 bp, synthetic construct
  misc_feature 1..15: note = Description of Artificial Sequence: Synthetic linker
  source 1..15: mol_type = other DNA
tcaggtggcggtagt

SEQ ID NO: 5650 - DNA, 561 bp, synthetic construct; identical to SEQ ID NO: 73
  misc_feature 1..561: note = Description of Artificial Sequence: Synthetic destabilizing domain (DD)
  source 1..561: mol_type = other DNA

SEQ ID NO: 5651 - DNA, 561 bp, synthetic construct; identical to SEQ ID NO: 75
  misc_feature 1..561: note = Description of Artificial Sequence: Synthetic destabilizing domain (DD)
  source 1..561: mol_type = other DNA

SEQ ID NO: 5652 - DNA, 561 bp, synthetic construct; identical to SEQ ID NO: 79
  misc_feature 1..561: note = Description of Artificial Sequence: Synthetic destabilizing domain (DD)
  source 1..561: mol_type = other DNA

SEQ ID NO: 5653 - DNA, 1824 bp, synthetic construct; identical to SEQ ID NO: 178
  misc_feature 1..1824: note = Description of Artificial Sequence: Synthetic polynucleotide
  source 1..1824: mol_type = other DNA

SEQ ID NO: 5654 - DNA, 1824 bp, synthetic construct; identical to SEQ ID NO: 179
  misc_feature 1..1824: note = Description of Artificial Sequence: Synthetic polynucleotide
  source 1..1824: mol_type = other DNA

SEQ ID NO: 5655 - DNA, 1824 bp, synthetic construct; identical to SEQ ID NO: 180
  misc_feature 1..1824: note = Description of Artificial Sequence: Synthetic polynucleotide
  source 1..1824: mol_type = other DNA

SEQ ID NO: 5656 - DNA, 60 bp, Homo sapiens; identical to SEQ ID NO: 1777
  source 1..60: mol_type = other DNA

SEQ ID NO: 5657 - DNA, 60 bp, synthetic construct; identical to SEQ ID NO: 1776
  misc_feature 1..60: note = Description of Artificial Sequence: Synthetic signal sequence
  source 1..60: mol_type = other DNA

SEQ ID NO: 5658 - DNA, 60 bp, synthetic construct; identical to SEQ ID NO: 1778
  misc_feature 1..60: note = Description of Artificial Sequence: Synthetic signal sequence
  source 1..60: mol_type = other DNA

SEQ ID NO: 5659 - DNA, 60 bp, synthetic construct; identical to SEQ ID NO: 1779
  misc_feature 1..60: note = Description of Artificial Sequence: Synthetic signal sequence
  source 1..60: mol_type = other DNA

SEQ ID NO: 5660 - DNA, 1245 bp, Homo sapiens; identical to SEQ ID NO: 2269
  source 1..1245: mol_type = other DNA

SEQ ID NO: 5661 - DNA, 1245 bp, Homo sapiens; identical to SEQ ID NO: 2270
  source 1..1245: mol_type = other DNA

SEQ ID NO: 5662 - DNA, 855 bp, Homo sapiens; identical to SEQ ID NO: 2272
  source 1..855: mol_type = other DNA

SEQ ID NO: 5663 - DNA, 39 bp, synthetic construct; identical to SEQ ID NO: 2274
  misc_feature 1..39: note = Description of Artificial Sequence: Synthetic linker
  source 1..39: mol_type = other DNA

SEQ ID NO: 5664 - DNA, 15 bp, synthetic construct
  misc_feature 1..15: note = Description of Artificial Sequence: Synthetic linker
  source 1..15: mol_type = other DNA
tcaggtggcggtagt

SEQ ID NO: 5665 - DNA, 15 bp, synthetic construct
  misc_feature 1..15: note = Description of Artificial Sequence: Synthetic linker
  source 1..15: mol_type = other DNA
agcggcggtggcagc

SEQ ID NO: 5666 - DNA, 15 bp, synthetic construct
  misc_feature 1..15: note = Description of Artificial Sequence: Synthetic linker
  source 1..15: mol_type = other DNA
tcaggcggggggagt

SEQ ID NO: 5667 - DNA, 39 bp, synthetic construct; identical to SEQ ID NO: 2280
  misc_feature 1..39: note = Description of Artificial Sequence: Synthetic linker
  source 1..39: mol_type = other DNA

SEQ ID NO: 5668 - DNA, 321 bp, synthetic construct; identical to SEQ ID NO: 1786
  misc_feature 1..321: note = Description of Artificial Sequence: Synthetic Destabilized Domian (DD)
  source 1..321: mol_type = other DNA

SEQ ID NO: 5669 - DNA, 321 bp, synthetic construct; identical to SEQ ID NO: 1664
  misc_feature 1..321: note = Description of Artificial Sequence: Synthetic Destabilized Domian (DD)
  source 1..321: mol_type = other DNA

SEQ ID NO: 5670 - DNA, 321 bp, synthetic construct; identical to SEQ ID NO: 1665
  misc_feature 1..321: note = Description of Artificial Sequence: Synthetic Destabilized Domian (DD)
  source 1..321: mol_type = other DNA

SEQ ID NO: 5671 - DNA, 321 bp, synthetic construct; identical to SEQ ID NO: 1666
  misc_feature 1..321: note = Description of Artificial Sequence: Synthetic Destabilized Domian (DD)
  source 1..321: mol_type = other DNA

SEQ ID NO: 5672 - DNA, 321 bp, synthetic construct; identical to SEQ ID NO: 1667
  misc_feature 1..321: note = Description of Artificial Sequence: Synthetic Destabilized Domian (DD)
  source 1..321: mol_type = other DNA

SEQ ID NO: 5673 - DNA, 321 bp, synthetic construct; identical to SEQ ID NO: 1668
  misc_feature 1..321: note = Description of Artificial Sequence: Synthetic Destabilized Domian (DD)
  source 1..321: mol_type = other DNA

SEQ ID NO: 5674 - DNA, 321 bp, synthetic construct; identical to SEQ ID NO: 2283
  misc_feature 1..321: note = Description of Artificial Sequence: Synthetic Destabilized Domian (DD)
  source 1..321: mol_type = other DNA

SEQ ID NO: 5675 - DNA, 321 bp, synthetic construct; identical to SEQ ID NO: 1764
  misc_feature 1..321: note = Description of Artificial Sequence: Synthetic Destabilized Domian (DD)
  source 1..321: mol_type = other DNA

SEQ ID NO: 5676 - DNA, 324 bp, synthetic construct; identical to SEQ ID NO: 1669
  misc_feature 1..324: note = Description of Artificial Sequence: Synthetic Destabilized Domian (DD)
  source 1..324: mol_type = other DNA

SEQ ID NO: 5677 - DNA, 324 bp, synthetic construct; identical to SEQ ID NO: 1670
  misc_feature 1..324: note = Description of Artificial Sequence: Synthetic Destabilized Domian (DD)
  source 1..324: mol_type = other DNA

SEQ ID NO: 5678 - DNA, 324 bp, synthetic construct; identical to SEQ ID NO: 1671
  misc_feature 1..324: note = Description of Artificial Sequence: Synthetic Destabilized Domian (DD)
  source 1..324: mol_type = other DNA

SEQ ID NO: 5679 - DNA, 324 bp, synthetic construct; identical to SEQ ID NO: 1672
  misc_feature 1..324: note = Description of Artificial Sequence: Synthetic Destabilized Domian (DD)
  source 1..324: mol_type = other DNA

SEQ ID NO: 5680 - DNA, 321 bp, synthetic construct; identical to SEQ ID NO: 1673
  misc_feature 1..321: note = Description of Artificial Sequence: Synthetic Destabilized Domian (DD)
  source 1..321: mol_type = other DNA

SEQ ID NO: 5681 - DNA, 321 bp, synthetic construct; identical to SEQ ID NO: 1674
  misc_feature 1..321: note = Description of Artificial Sequence: Synthetic Destabilized Domian (DD)
  source 1..321: mol_type = other DNA

SEQ ID NO: 5682 - DNA, 321 bp, synthetic construct; identical to SEQ ID NO: 1675
  misc_feature 1..321: note = Description of Artificial Sequence: Synthetic Destabilized Domian (DD)
  source 1..321: mol_type = other DNA

SEQ ID NO: 5683 - DNA, 477 bp, synthetic construct
  misc_feature 1..477: note = Description of Artificial Sequence: Synthetic Destabilized Domian (DD)
  source 1..477: mol_type = other DNA
atgatctctctgattgcggcgctggcagttgactacgttattggcatggaaaacgcgatgccatggaacctcccggctgacctggcgtggttcaaacgtaacaccctgaacaaacctgtgatcatgggtcgtcacacctgggaatctattggccgtcctctcccgggtcgtaaaaacatcattctgtcttctcagccaggcaccgacgaccgtgttacctgggttaaaagcgttgacgaagcgattgctgcgtgcggtgatgttcctgaaattatggtgatcggcggtggccgtgttatcgaacagttcctgccgaaagcgcagaaactgtacctgacccacatcgacgcggaagttgaaggtgacacccacttcccggactacgaaccggatgattgggagagcgtattctccgaattccatgatgcggatgcgcaaaactctcattcttactgttttgaaatcctggaacgtcgt

SEQ ID NO: 5684 - DNA, 236 bp, synthetic construct; identical to SEQ ID NO: 2287
  misc_feature 1..236: note = Description of Artificial Sequence: Synthetic Destabilized Domian (DD)
  source 1..236: mol_type = other DNA

SEQ ID NO: 5685 - DNA, 474 bp, synthetic construct; identical to SEQ ID NO: 1678
  misc_feature 1..474: note = Description of Artificial Sequence: Synthetic Destabilized Domian (DD)
  source 1..474: mol_type = other DNA

SEQ ID NO: 5686 - DNA, 474 bp, synthetic construct; identical to SEQ ID NO: 1676
  misc_feature 1..474: note = Description of Artificial Sequence: Synthetic Destabilized Domian (DD)
  source 1..474: mol_type = other DNA

SEQ ID NO: 5687 - DNA, 477 bp, synthetic construct; identical to SEQ ID NO: 1677
  misc_feature 1..477: note = Description of Artificial Sequence: Synthetic Destabilized Domian (DD)
  source 1..477: mol_type = other DNA

SEQ ID NO: 5688 - DNA, 474 bp, synthetic construct; identical to SEQ ID NO: 1678
  misc_feature 1..474: note = Description of Artificial Sequence: Synthetic Destabilized Domian (DD)
  source 1..474: mol_type = other DNA

SEQ ID NO: 5689 - DNA, 474 bp, synthetic construct; identical to SEQ ID NO: 1679
  misc_feature 1..474: note = Description of Artificial Sequence: Synthetic Destabilized Domian (DD)
  source 1..474: mol_type = other DNA

SEQ ID NO: 5690 - DNA, 474 bp, synthetic construct; identical to SEQ ID NO: 1680
  misc_feature 1..474: note = Description of Artificial Sequence: Synthetic Destabilized Domian (DD)
  source 1..474: mol_type = other DNA

SEQ ID NO: 5691 - DNA, 474 bp, synthetic construct; identical to SEQ ID NO: 1681
  misc_feature 1..474: note = Description of Artificial Sequence: Synthetic Destabilized Domian (DD)
  source 1..474: mol_type = other DNA

SEQ ID NO: 5692 - DNA, 561 bp, synthetic construct; identical to SEQ ID NO: 73
  misc_feature 1..561: note = Description of Artificial Sequence: Synthetic Destabilized Domian (DD)
  source 1..561: mol_type = other DNA

SEQ ID NO: 5693 - DNA, 561 bp, synthetic construct; identical to SEQ ID NO: 75
  misc_feature 1..561: note = Description of Artificial Sequence: Synthetic Destabilized Domian (DD)
  source 1..561: mol_type = other DNA

SEQ ID NO: 5694 - DNA, 561 bp, synthetic construct; identical to SEQ ID NO: 79
  misc_feature 1..561: note = Description of Artificial Sequence: Synthetic Destabilized Domian (DD)
  source 1..561: mol_type = other DNA

SEQ ID NO: 5695 - DNA, 1587 bp, synthetic construct; identical to SEQ ID NO: 2294
  misc_feature 1..1587: note = Description of Artificial Sequence: Synthetic Payload sequence
  source 1..1587: mol_type = other DNA

SEQ ID NO: 5696 - DNA, 1740 bp, synthetic construct; identical to SEQ ID NO: 2295
  misc_feature 1..1740: note = Description of Artificial Sequence: Synthetic Payload sequence
  source 1..1740: mol_type = other DNA

SEQ ID NO: 5697 - DNA, 1824 bp, synthetic construct; identical to SEQ ID NO: 178
  misc_feature 1..1824: note = Description of Artificial Sequence: Synthetic Payload sequence
  source 1..1824: mol_type = other DNA

SEQ ID NO: 5698 - DNA, 1824 bp, synthetic construct; identical to SEQ ID NO: 179
  misc_feature 1..1824: note = Description of Artificial Sequence: Synthetic Payload sequence
  source 1..1824: mol_type = other DNA

SEQ ID NO: 5699 - DNA, 1824 bp, synthetic construct; identical to SEQ ID NO: 180
  misc_feature 1..1824: note = Description of Artificial Sequence: Synthetic Payload sequence
  source 1..1824: mol_type = other DNA

SEQ ID NO: 5700 - DNA, 1242 bp, synthetic construct; identical to SEQ ID NO: 2299
  misc_feature 1..1242: note = Description of Artificial Sequence: Synthetic Payload sequence
  source 1..1242: mol_type = other DNA

SEQ ID NO: 5701 - DNA, 1578 bp, synthetic construct; identical to SEQ ID NO: 2300
  misc_feature 1..1578: note = Description of Artificial Sequence: Synthetic Payload sequence
  source 1..1578: mol_type = other DNA

SEQ ID NO: 5702 - DNA, 1731 bp, synthetic construct; identical to SEQ ID NO: 2301
  misc_feature 1..1731: note = Description of Artificial Sequence: Synthetic Payload sequence
  source 1..1731: mol_type = other DNA

SEQ ID NO: 5703 - DNA, 1731 bp, synthetic construct; identical to SEQ ID NO: 2302
  misc_feature 1..1731: note = Description of Artificial Sequence: Synthetic Payload sequence
  source 1..1731: mol_type = other DNA

SEQ ID NO: 5704 - DNA, 15 bp, synthetic construct
  misc_feature 1..15: note = Description of Artificial Sequence: Synthetic Linker sequence
  source 1..15: mol_type = other DNA
tcaggtggcggtagt

SEQ ID NO: 5705 - DNA, 15 bp, synthetic construct
  misc_feature 1..15: note = Description of Artificial Sequence: Synthetic Linker sequence
  source 1..15: mol_type = other DNA
agcggcggtggcagc

SEQ ID NO: 5706 - DNA, 15 bp, synthetic construct
  misc_feature 1..15: note = Description of Artificial Sequence: Synthetic Linker sequence
  source 1..15: mol_type = other DNA
tcaggcggggggagt

SEQ ID NO: 5707 - DNA, 321 bp, synthetic construct; identical to SEQ ID NO: 1786
  misc_feature 1..321: note = Description of Artificial Sequence: Synthetic Destabilized Domain (DD)
  source 1..321: mol_type = other DNA

SEQ ID NO: 5708 - DNA, 321 bp, synthetic construct; identical to SEQ ID NO: 1664
  misc_feature 1..321: note = Description of Artificial Sequence: Synthetic Destabilizing Domain (DD)
  source 1..321: mol_type = other DNA

SEQ ID NO: 5709 - DNA, 321 bp, synthetic construct; identical to SEQ ID NO: 1665
  misc_feature 1..321: note = Description of Artificial Sequence: Synthetic Destabilizing Domain (DD)
  source 1..321: mol_type = other DNA

SEQ ID NO: 5710 - DNA, 321 bp, synthetic construct; identical to SEQ ID NO: 1666
  misc_feature 1..321: note = Description of Artificial Sequence: Synthetic Destabilizing Domain (DD)
  source 1..321: mol_type = other DNA

SEQ ID NO: 5711 - DNA, 321 bp, synthetic construct; identical to SEQ ID NO: 1667
  misc_feature 1..321: note = Description of Artificial Sequence: Synthetic Destabilizing Domain (DD)
  source 1..321: mol_type = other DNA

SEQ ID NO: 5712 - DNA, 321 bp, synthetic construct; identical to SEQ ID NO: 1668
  misc_feature 1..321: note = Description of Artificial Sequence: Synthetic Destabilizing Domain (DD)
  source 1..321: mol_type = other DNA

SEQ ID NO: 5713 - DNA, 321 bp, synthetic construct; identical to SEQ ID NO: 1764
  misc_feature 1..321: note = Description of Artificial Sequence: Synthetic Destabilizing Domain (DD)
  source 1..321: mol_type = other DNA

SEQ ID NO: 5714 - DNA, 324 bp, synthetic construct; identical to SEQ ID NO: 1669
  misc_feature 1..324: note = Description of Artificial Sequence: Synthetic Destabilizing Domain (DD)
  source 1..324: mol_type = other DNA

SEQ ID NO: 5715 - DNA, 324 bp, synthetic construct; identical to SEQ ID NO: 1670
  misc_feature 1..324: note = Description of Artificial Sequence: Synthetic Destabilizing Domain (DD)
  source 1..324: mol_type = other DNA

SEQ ID NO: 5716 - DNA, 324 bp, synthetic construct; identical to SEQ ID NO: 1671
  misc_feature 1..324: note = Description of Artificial Sequence: Synthetic Destabilizing Domain (DD)
  source 1..324: mol_type = other DNA

SEQ ID NO: 5717 - DNA, 324 bp, synthetic construct; identical to SEQ ID NO: 1672
  misc_feature 1..324: note = Description of Artificial Sequence: Synthetic Destabilizing Domain (DD)
  source 1..324: mol_type = other DNA

SEQ ID NO: 5718 - DNA, 321 bp, synthetic construct; identical to SEQ ID NO: 1673
  misc_feature 1..321: note = Description of Artificial Sequence: Synthetic Destabilizing Domain (DD)
  source 1..321: mol_type = other DNA

SEQ ID NO: 5719 - DNA, 321 bp, synthetic construct; identical to SEQ ID NO: 1674
  misc_feature 1..321: note = Description of Artificial Sequence: Synthetic Destabilizing Domain (DD)
  source 1..321: mol_type = other DNA

SEQ ID NO: 5720 - DNA, 321 bp, synthetic construct; identical to SEQ ID NO: 1675
  misc_feature 1..321: note = Description of Artificial Sequence: Synthetic Destabilizing Domain (DD)
  source 1..321: mol_type = other DNA

SEQ ID NO: 5721 - DNA, 477 bp, synthetic construct; identical to SEQ ID NO: 5683
  misc_feature 1..477: note = Description of Artificial Sequence: Synthetic Destabilizing Domain (DD)
  source 1..477: mol_type = other DNA

SEQ ID NO: 5722 - DNA, 474 bp, synthetic construct; identical to SEQ ID NO: 1678
  misc_feature 1..474: note = Description of Artificial Sequence: Synthetic Destabilized Domain (DD)
  source 1..474: mol_type = other DNA

SEQ ID NO: 5723 - DNA, 474 bp, synthetic construct; identical to SEQ ID NO: 1676
  misc_feature 1..474: note = Description of Artificial Sequence: Synthetic Destabilizing Domain (DD)
  source 1..474: mol_type = other DNA

SEQ ID NO: 5724 - DNA, 474 bp, synthetic construct; identical to SEQ ID NO: 1681
  misc_feature 1..474: note = Description of Artificial Sequence: Synthetic Destabilizing Domain (DD)
  source 1..474: mol_type = other DNA

SEQ ID NO: 5725 - DNA, 1293 bp, synthetic construct; identical to SEQ ID NO: 2303
  misc_feature 1..1293: note = Description of Artificial Sequence: Synthetic Payload sequence
  source 1..1293: mol_type = other DNA

SEQ ID NO: 5726 - DNA, 1290 bp, synthetic construct; identical to SEQ ID NO: 2304
  misc_feature 1..1290: note = Description of Artificial Sequence: Synthetic Payload sequence
  source 1..1290: mol_type = other DNA

SEQ ID NO: 5727 - DNA, 1188 bp, synthetic construct; identical to SEQ ID NO: 2305
  misc_feature 1..1188: note = Description of Artificial Sequence: Synthetic Payload sequence
  source 1..1188: mol_type = other DNA

SEQ ID NO: 5728 - DNA, 1185 bp, synthetic construct; identical to SEQ ID NO: 2306
  misc_feature 1..1185: note = Description of Artificial Sequence: Synthetic Payload sequence
  source 1..1185: mol_type = other DNA

SEQ ID NO: 5729 - DNA, 1296 bp, synthetic construct; identical to SEQ ID NO: 2307
  misc_feature 1..1296: note = Description of Artificial Sequence: Synthetic construct
  source 1..1296: mol_type = other DNA

SEQ ID NO: 5730 - DNA, 1191 bp, synthetic construct; identical to SEQ ID NO: 2308
  misc_feature 1..1191: note = Description of Artificial Sequence: Synthetic construct
  source 1..1191: mol_type = other DNA

SEQ ID NO: 5731 - DNA, 1632 bp, synthetic construct; identical to SEQ ID NO: 2309
  misc_feature 1..1632: note = Description of Artificial Sequence: Synthetic construct
  source 1..1632: mol_type = other DNA

SEQ ID NO: 5732 - DNA, 1785 bp, synthetic construct; identical to SEQ ID NO: 2310
  misc_feature 1..1785: note = Description of Artificial Sequence: Synthetic construct
  source 1..1785: mol_type = other DNA

SEQ ID NO: 5733 - DNA, 1623 bp, synthetic construct; identical to SEQ ID NO: 2311
  misc_feature 1..1623: note = Description of Artificial Sequence: Synthetic construct
  source 1..1623: mol_type = other DNA

SEQ ID NO: 5734 - DNA, 1776 bp, synthetic construct; identical to SEQ ID NO: 2312
  misc_feature 1..1776: note = Description of Artificial Sequence: Synthetic construct
  source 1..1776: mol_type = other DNA

SEQ ID NO: 5735 - DNA, 1518 bp, synthetic construct; identical to SEQ ID NO: 2313
  misc_feature 1..1518: note = Description of Artificial Sequence: Synthetic construct
  source 1..1518: mol_type = other DNA

SEQ ID NO: 5736 - DNA, 1671 bp, synthetic construct; identical to SEQ ID NO: 2314
  misc_feature 1..1671: note = Description of Artificial Sequence: Synthetic construct
  source 1..1671: mol_type = other DNA

SEQ ID NO: 5737 - DNA, 1518 bp, synthetic construct; identical to SEQ ID NO: 2315
  misc_feature 1..1518: note = Description of Artificial Sequence: Synthetic construct
  source 1..1518: mol_type = other DNA

SEQ ID NO: 5738 - DNA, 1671 bp, synthetic construct; identical to SEQ ID NO: 2316
  misc_feature 1..1671: note = Description of Artificial Sequence: Synthetic construct
  source 1..1671: mol_type = other DNA

SEQ ID NO: 5739 - DNA, 60 bp, Homo sapiens; identical to SEQ ID NO: 1777
  source 1..60: mol_type = other DNA

SEQ ID NO: 5740 - DNA, 60 bp, synthetic construct; identical to SEQ ID NO: 1776
  misc_feature 1..60: note = Description of Artificial Sequence: Synthetic signal sequence
  source 1..60: mol_type = other DNA

SEQ ID NO: 5741 - DNA, 60 bp, synthetic construct; identical to SEQ ID NO: 1778
  misc_feature 1..60: note = Description of Artificial Sequence: Synthetic signal sequence
  source 1..60: mol_type = other DNA

SEQ ID NO: 5742 - DNA, 60 bp, synthetic construct; identical to SEQ ID NO: 1779
  misc_feature 1..60: note = Description of Artificial Sequence: Synthetic signal sequence
  source 1..60: mol_type = other DNA

SEQ ID NO: 5743 - protein, 15 aa, synthetic construct
  REGION 1..15: note = Description of Artificial Sequence: Synthetic linker
GGGGSGGGGSGGGGS

SEQ ID NO: 5744 - protein, 12 aa, synthetic construct
  REGION 1..12: note = Description of Artificial Sequence: Synthetic cleavage site
ESRRVRRNKRSK

SEQ ID NO: 5745 - protein, 306 aa, Homo sapiens; identical to SEQ ID NO: 734

SEQ ID NO: 5746 - protein, 197 aa, Homo sapiens; identical to SEQ ID NO: 735

SEQ ID NO: 5747 - protein, 540 aa, synthetic construct; identical to SEQ ID NO: 1831
  REGION 1..540: note = Description of Artificial Sequence: Synthetic polypeptide

SEQ ID NO: 5748 - protein, 738 aa, synthetic construct; identical to SEQ ID NO: 1835
  REGION 1..738: note = Description of Artificial Sequence: Synthetic polypeptide

SEQ ID NO: 5749 - DNA, 66 bp, Homo sapiens; identical to SEQ ID NO: 1580
  source 1..66: mol_type = other DNA

SEQ ID NO: 5750 - DNA, 66 bp, synthetic construct; identical to SEQ ID NO: 1581
  misc_feature 1..66: note = Description of Artificial Sequence: Synthetic signal sequence
  source 1..66: mol_type = other DNA

SEQ ID NO: 5751 - DNA, 66 bp, synthetic construct; identical to SEQ ID NO: 1582
  misc_feature 1..66: note = Description of Artificial Sequence: Synthetic signal sequence
  source 1..66: mol_type = other DNA

SEQ ID NO: 5752 - DNA, 66 bp, synthetic construct; identical to SEQ ID NO: 1583
  misc_feature 1..66: note = Description of Artificial Sequence: Synthetic signal sequence
  source 1..66: mol_type = other DNA

SEQ ID NO: 5753 - DNA, 66 bp, synthetic construct; identical to SEQ ID NO: 1584
  misc_feature 1..66: note = Description of Artificial Sequence: Synthetic signal sequence
  source 1..66: mol_type = other DNA

SEQ ID NO: 5754 - DNA, 66 bp, synthetic construct; identical to SEQ ID NO: 1585
  misc_feature 1..66: note = Description of Artificial Sequence: Synthetic signal sequence
  source 1..66: mol_type = other DNA

SEQ ID NO: 5755 - DNA, 66 bp, synthetic construct; identical to SEQ ID NO: 1586
  misc_feature 1..66: note = Description of Artificial Sequence: Synthetic signal sequence
  source 1..66: mol_type = other DNA

SEQ ID NO: 5756 - DNA, 66 bp, synthetic construct; identical to SEQ ID NO: 1587
  misc_feature 1..66: note = Description of Artificial Sequence: Synthetic signal sequence
  source 1..66: mol_type = other DNA

SEQ ID NO: 5757 - DNA, 66 bp, synthetic construct; identical to SEQ ID NO: 1588
  misc_feature 1..66: note = Description of Artificial Sequence: Synthetic signal sequence
  source 1..66: mol_type = other DNA

SEQ ID NO: 5758 - protein, 21 aa, synthetic construct
  REGION 1..21: note = Description of Artificial Sequence: Synthetic peptide
LLLVTSLLLCELPHPAFLLIP

SEQ ID NO: 5759 - protein, 22 aa, synthetic construct
  REGION 1..22: note = Description of Artificial Sequence: Synthetic peptide
LLVTSLLLCELPHPAFLLIPDT

SEQ ID NO: 5760 - protein, 24 aa, synthetic construct
  REGION 1..24: note = Description of Artificial Sequence: Synthetic peptide
MVLLVTSLLLCELPHPAFLLIPDT

SEQ ID NO: 5761 - DNA, 60 bp, Homo sapiens; identical to SEQ ID NO: 1776
  source 1..60: mol_type = other DNA

SEQ ID NO: 5762 - DNA, 60 bp, synthetic construct; identical to SEQ ID NO: 1777
  misc_feature 1..60: note = Description of Artificial Sequence: Synthetic signal sequence
  source 1..60: mol_type = other DNA

SEQ ID NO: 5763 - DNA, 60 bp, synthetic construct; identical to SEQ ID NO: 1778
  misc_feature 1..60: note = Description of Artificial Sequence: Synthetic signal sequence
  source 1..60: mol_type = other DNA

SEQ ID NO: 5764 - DNA, 60 bp, synthetic construct; identical to SEQ ID NO: 1779
  misc_feature 1..60: note = Description of Artificial Sequence: Synthetic signal sequence
  source 1..60: mol_type = other DNA

SEQ ID NO: 5765 - protein, 22 aa, Homo sapiens
MCHQQLVISWFSLVFLASPLVA

SEQ ID NO: 5766 - DNA, 66 bp, Homo sapiens; identical to SEQ ID NO: 1580
  source 1..66: mol_type = other DNA

SEQ ID NO: 5767 - DNA, 66 bp, synthetic construct; identical to SEQ ID NO: 1581
  misc_feature 1..66: note = Description of Artificial Sequence: Synthetic signal sequence
  source 1..66: mol_type = other DNA

SEQ ID NO: 5768 - DNA, 66 bp, synthetic construct; identical to SEQ ID NO: 1582
  misc_feature 1..66: note = Description of Artificial Sequence: Synthetic signal sequence
  source 1..66: mol_type = other DNA

SEQ ID NO: 5769 - DNA, 66 bp, synthetic construct; identical to SEQ ID NO: 1583
  misc_feature 1..66: note = Description of Artificial Sequence: Synthetic signal sequence
  source 1..66: mol_type = other DNA

SEQ ID NO: 5770 - DNA, 66 bp, synthetic construct; identical to SEQ ID NO: 1584
  misc_feature 1..66: note = Description of Artificial Sequence: Synthetic signal sequence
  source 1..66: mol_type = other DNA

SEQ ID NO: 5771 - DNA, 66 bp, synthetic construct; identical to SEQ ID NO: 1585
  misc_feature 1..66: note = Description of Artificial Sequence: Synthetic signal sequence
  source 1..66: mol_type = other DNA

SEQ ID NO: 5772 - DNA, 66 bp, synthetic construct; identical to SEQ ID NO: 1586
  misc_feature 1..66: note = Description of Artificial Sequence: Synthetic signal sequence
  source 1..66: mol_type = other DNA

SEQ ID NO: 5773 - DNA, 66 bp, synthetic construct; identical to SEQ ID NO: 1587
  misc_feature 1..66: note = Description of Artificial Sequence: Synthetic signal sequence
  source 1..66: mol_type = other DNA

SEQ ID NO: 5774 - DNA, 66 bp, synthetic construct; identical to SEQ ID NO: 1588
  misc_feature 1..66: note = Description of Artificial Sequence: Synthetic signal sequence
  source 1..66: mol_type = other DNA

SEQ ID NO: 5775 - DNA, 60 bp, synthetic construct; identical to SEQ ID NO: 1776
  misc_feature 1..60: note = Description of Artificial Sequence: Synthetic signal sequence
  source 1..60: mol_type = other DNA

SEQ ID NO: 5776 - DNA, 60 bp, Homo sapiens; identical to SEQ ID NO: 1777
  source 1..60: mol_type = other DNA

SEQ ID NO: 5777 - DNA, 60 bp, synthetic construct; identical to SEQ ID NO: 1778
  misc_feature 1..60: note = Description of Artificial Sequence: Synthetic signal sequence
  source 1..60: mol_type = other DNA

SEQ ID NO: 5778 - DNA, 60 bp, synthetic construct; identical to SEQ ID NO: 1779
  misc_feature 1..60: note = Description of Artificial Sequence: Synthetic signal sequence
  source 1..60: mol_type = other DNA

SEQ ID NO: 5779 - protein, 22 aa, Homo sapiens
MCHQQLVISWFSLVFLASPLVA

SEQ ID NO: 5780 - DNA, 66 bp, Homo sapiens; identical to SEQ ID NO: 1580
  source 1..66: mol_type = other DNA

SEQ ID NO: 5781 - DNA, 66 bp, synthetic construct; identical to SEQ ID NO: 1581
  misc_feature 1..66: note = Description of Artificial Sequence: Synthetic signal sequence
  source 1..66: mol_type = other DNA

SEQ ID NO: 5782 - DNA, 66 bp, synthetic construct; identical to SEQ ID NO: 1582
  misc_feature 1..66: note = Description of Artificial Sequence: Synthetic signal sequence
  source 1..66: mol_type = other DNA

SEQ ID NO: 5783 - DNA, 66 bp, synthetic construct; identical to SEQ ID NO: 1583
  misc_feature 1..66: note = Description of Artificial Sequence: Synthetic signal sequence
  source 1..66: mol_type = other DNA

SEQ ID NO: 5784 - DNA, 66 bp, synthetic construct; identical to SEQ ID NO: 1584
  misc_feature 1..66: note = Description of Artificial Sequence: Synthetic signal sequence
  source 1..66: mol_type = other DNA

SEQ ID NO: 5785 - DNA, 66 bp, synthetic construct; identical to SEQ ID NO: 1585
  misc_feature 1..66: note = Description of Artificial Sequence: Synthetic signal sequence
  source 1..66: mol_type = other DNA

SEQ ID NO: 5786 - DNA, 66 bp, synthetic construct; identical to SEQ ID NO: 1586
  misc_feature 1..66: note = Description of Artificial Sequence: Synthetic signal sequence
  source 1..66: mol_type = other DNA

SEQ ID NO: 5787 - DNA, 66 bp, synthetic construct; identical to SEQ ID NO: 1587
  misc_feature 1..66: note = Description of Artificial Sequence: Synthetic signal sequence
  source 1..66: mol_type = other DNA

SEQ ID NO: 5788 - DNA, 66 bp, synthetic construct; identical to SEQ ID NO: 1588
  misc_feature 1..66: note = Description of Artificial Sequence: Synthetic signal sequence
  source 1..66: mol_type = other DNA

SEQ ID NO: 5789 - DNA, 90 bp, synthetic construct; identical to SEQ ID NO: 1724
  misc_feature 1..90: note = Description of Artificial Sequence: Synthetic leader sequence
  source 1..90: mol_type = other DNA

SEQ ID NO: 5790 - protein, 22 aa, synthetic construct
  REGION 1..22: note = Description of Artificial Sequence: Synthetic signal sequence
LLVTSLLLCELPHPAFLLIPDT

SEQ ID NO: 5791 - protein, 24 aa, synthetic construct
  REGION 1..24: note = Description of Artificial Sequence: Synthetic signal sequence
MVLLVTSLLLCELPHPAFLLIPDT

SEQ ID NO: 5792 - DNA, 54 bp, Homo sapiens; identical to SEQ ID NO: 1850
  source 1..54: mol_type = other DNA

SEQ ID NO: 5793 - DNA, 63 bp, Homo sapiens; identical to SEQ ID NO: 1321
  source 1..63: mol_type = other DNA

SEQ ID NO: 5794 - DNA, 63 bp, synthetic construct; identical to SEQ ID NO: 1322
  misc_feature 1..63: note = Description of Artificial Sequence: Synthetic signal sequence
  source 1..63: mol_type = other DNA

SEQ ID NO: 5795 - DNA, 63 bp, synthetic construct; identical to SEQ ID NO: 1323
  misc_feature 1..63: note = Description of Artificial Sequence: Synthetic signal sequence
  source 1..63: mol_type = other DNA

SEQ ID NO: 5796 - DNA, 63 bp, synthetic construct; identical to SEQ ID NO: 1324
  misc_feature 1..63: note = Description of Artificial Sequence: Synthetic signal sequence
  source 1..63: mol_type = other DNA

SEQ ID NO: 5797 - DNA, 63 bp, synthetic construct; identical to SEQ ID NO: 1325
  misc_feature 1..63: note = Description of Artificial Sequence: Synthetic signal sequence
  source 1..63: mol_type = other DNA

SEQ ID NO: 5798 - DNA, 63 bp, synthetic construct; identical to SEQ ID NO: 1326
  misc_feature 1..63: note = Description of Artificial Sequence: Synthetic signal sequence
  source 1..63: mol_type = other DNA

SEQ ID NO: 5799 - DNA, 63 bp, synthetic construct; identical to SEQ ID NO: 1327
  misc_feature 1..63: note = Description of Artificial Sequence: Synthetic signal sequence
  source 1..63: mol_type = other DNA

SEQ ID NO: 5800 - DNA, 63 bp, synthetic construct; identical to SEQ ID NO: 1328
  misc_feature 1..63: note = Description of Artificial Sequence: Synthetic signal sequence
  source 1..63: mol_type = other DNA

SEQ ID NO: 5801 - protein, 30 aa, synthetic construct; identical to SEQ ID NO: 1919
  REGION 1..30: note = Description of Artificial Sequence: Synthetic signal sequence

SEQ ID NO: 5802 - DNA, 90 bp, synthetic construct; identical to SEQ ID NO: 1724
  misc_feature 1..90: note = Description of Artificial Sequence: Synthetic signal sequence
  source 1..90: mol_type = other DNA

SEQ ID NO: 5803 - DNA, 54 bp, Homo sapiens; identical to SEQ ID NO: 1850
  source 1..54: mol_type = other DNA

SEQ ID NO: 5804 - DNA, 54 bp, synthetic construct; identical to SEQ ID NO: 1851
  misc_feature 1..54: note = Description of Artificial Sequence: Synthetic signal sequence
  source 1..54: mol_type = other DNA

SEQ ID NO: 5805 - DNA, 54 bp, synthetic construct; identical to SEQ ID NO: 1852
  misc_feature 1..54: note = Description of Artificial Sequence: Synthetic signal sequence
  source 1..54: mol_type = other DNA

SEQ ID NO: 5806 - DNA, 90 bp, synthetic construct; identical to SEQ ID NO: 1724
  misc_feature 1..90: note = Description of Artificial Sequence: Synthetic signal sequence
  source 1..90: mol_type = other DNA

SEQ ID NO: 5807 - protein, 21 aa, Homo sapiens
MALPVTALLLPLALLLHAARP

SEQ ID NO: 5808 - DNA, 63 bp, Homo sapiens; identical to SEQ ID NO: 1321
  source 1..63: mol_type = other DNA

SEQ ID NO: 5809 - DNA, 63 bp, synthetic construct; identical to SEQ ID NO: 1322
  misc_feature 1..63: note = Description of Artificial Sequence: Synthetic signal sequence
  source 1..63: mol_type = other DNA

SEQ ID NO: 5810 - DNA, 63 bp, synthetic construct; identical to SEQ ID NO: 1323
  misc_feature 1..63: note = Description of Artificial Sequence: Synthetic signal sequence
  source 1..63: mol_type = other DNA

SEQ ID NO: 5811 - DNA, 63 bp, synthetic construct; identical to SEQ ID NO: 1324
  misc_feature 1..63: note = Description of Artificial Sequence: Synthetic signal sequence
  source 1..63: mol_type = other DNA

SEQ ID NO: 5812 - DNA, 63 bp, synthetic construct; identical to SEQ ID NO: 1325
  misc_feature 1..63: note = Description of Artificial Sequence: Synthetic signal sequence
  source 1..63: mol_type = other DNA

SEQ ID NO: 5813 - protein, 18 aa, Homo sapiens
MDWTWILFLVAAATRVHS

SEQ ID NO: 5814 - DNA, 54 bp, Homo sapiens; identical to SEQ ID NO: 1850
  source 1..54: mol_type = other DNA

SEQ ID NO: 5815 - DNA, 63 bp, Homo sapiens; identical to SEQ ID NO: 1321
  source 1..63: mol_type = other DNA

SEQ ID NO: 5816 - DNA, 63 bp, synthetic construct; identical to SEQ ID NO: 1322
  misc_feature 1..63: note = Description of Artificial Sequence: Synthetic signal sequence
  source 1..63: mol_type = other DNA

SEQ ID NO: 5817 - DNA, 63 bp, synthetic construct; identical to SEQ ID NO: 1323
  misc_feature 1..63: note = Description of Artificial Sequence: Synthetic signal sequence
  source 1..63: mol_type = other DNA

SEQ ID NO: 5818 - DNA, 63 bp, synthetic construct; identical to SEQ ID NO: 1324
  misc_feature 1..63: note = Description of Artificial Sequence: Synthetic signal sequence
  source 1..63: mol_type = other DNA

SEQ ID NO: 5819 - DNA, 63 bp, synthetic construct; identical to SEQ ID NO: 1325
  misc_feature 1..63: note = Description of Artificial Sequence: Synthetic signal sequence
  source 1..63: mol_type = other DNA

SEQ ID NO: 5820 - DNA, 63 bp, synthetic construct; identical to SEQ ID NO: 1754
  misc_feature 1..63: note = Description of Artificial Sequence: Synthetic leader sequence
  source 1..63: mol_type = other DNA

SEQ ID NO: 5821 - protein, 30 aa, Homo sapiens; identical to SEQ ID NO: 1919

SEQ ID NO: 5822 - DNA, 90 bp, Homo sapiens; identical to SEQ ID NO: 1724
  source 1..90: mol_type = other DNA

SEQ ID NO: 5823 - DNA, 60 bp, Homo sapiens; identical to SEQ ID NO: 1776
  source 1..60: mol_type = other DNA

SEQ ID NO: 5824 - DNA, 60 bp, synthetic construct; identical to SEQ ID NO: 1777
  misc_feature 1..60: note = Description of Artificial Sequence: Synthetic signal sequence
  source 1..60: mol_type = other DNA

SEQ ID NO: 5825 - DNA, 60 bp, synthetic construct; identical to SEQ ID NO: 1778
  misc_feature 1..60: note = Description of Artificial Sequence: Synthetic signal sequence
  source 1..60: mol_type = other DNA

SEQ ID NO: 5826 - DNA, 60 bp, synthetic construct; identical to SEQ ID NO: 1779
  misc_feature 1..60: note = Description of Artificial Sequence: Synthetic signal sequence
  source 1..60: mol_type = other DNA

SEQ ID NO: 5827 - DNA, 66 bp, Homo sapiens; identical to SEQ ID NO: 1580
  source 1..66: mol_type = other DNA

SEQ ID NO: 5828 - DNA, 66 bp, synthetic construct; identical to SEQ ID NO: 1581
  misc_feature 1..66: note = Description of Artificial Sequence: Synthetic signal sequence
  source 1..66: mol_type = other DNA

SEQ ID NO: 5829 - DNA, 66 bp, synthetic construct; identical to SEQ ID NO: 1582
  misc_feature 1..66: note = Description of Artificial Sequence: Synthetic signal sequence
  source 1..66: mol_type = other DNA

SEQ ID NO: 5830 - DNA, 66 bp, synthetic construct; identical to SEQ ID NO: 1583
  misc_feature 1..66: note = Description of Artificial Sequence: Synthetic signal sequence
  source 1..66: mol_type = other DNA

SEQ ID NO: 5831 - DNA, 66 bp, synthetic construct; identical to SEQ ID NO: 1584
  misc_feature 1..66: note = Description of Artificial Sequence: Synthetic signal sequence
  source 1..66: mol_type = other DNA

SEQ ID NO: 5832 - DNA, 66 bp, synthetic construct; identical to SEQ ID NO: 1585
  misc_feature 1..66: note = Description of Artificial Sequence: Synthetic signal sequence
  source 1..66: mol_type = other DNA

SEQ ID NO: 5833 - DNA, 66 bp, synthetic construct; identical to SEQ ID NO: 1586
  misc_feature 1..66: note = Description of Artificial Sequence: Synthetic signal sequence
  source 1..66: mol_type = other DNA

SEQ ID NO: 5834 - DNA, 66 bp, synthetic construct; identical to SEQ ID NO: 1587
  misc_feature 1..66: note = Description of Artificial Sequence: Synthetic signal sequence
  source 1..66: mol_type = other DNA

SEQ ID NO: 5835 - DNA, 66 bp, synthetic construct; identical to SEQ ID NO: 1588
  misc_feature 1..66: note = Description of Artificial Sequence: Synthetic signal sequence
  source 1..66: mol_type = other DNA

SEQ ID NO: 5836 - DNA, 54 bp, Homo sapiens; identical to SEQ ID NO: 1850
  source 1..54: mol_type = other DNA

SEQ ID NO: 5837 - DNA, 54 bp, Homo sapiens; identical to SEQ ID NO: 1851
  source 1..54: mol_type = other DNA

SEQ ID NO: 5838 - DNA, 54 bp, Homo sapiens; identical to SEQ ID NO: 1852
  source 1..54: mol_type = other DNA

SEQ ID NO: 5839 - DNA, 63 bp, Homo sapiens; identical to SEQ ID NO: 1321
  source 1..63: mol_type = other DNA

SEQ ID NO: 5840 - DNA, 63 bp, synthetic construct; identical to SEQ ID NO: 1322
  misc_feature 1..63: note = Description of Artificial Sequence: Synthetic signal sequence
  source 1..63: mol_type = other DNA

SEQ ID NO: 5841 - DNA, 63 bp, synthetic construct; identical to SEQ ID NO: 1323
  misc_feature 1..63: note = Description of Artificial Sequence: Synthetic signal sequence
  source 1..63: mol_type = other DNA

SEQ ID NO: 5842 - DNA, 63 bp, synthetic construct; identical to SEQ ID NO: 1324
  misc_feature 1..63: note = Description of Artificial Sequence: Synthetic signal sequence
  source 1..63: mol_type = other DNA

SEQ ID NO: 5843 - DNA, 63 bp, synthetic construct; identical to SEQ ID NO: 1325
  misc_feature 1..63: note = Description of Artificial Sequence: Synthetic signal sequence
  source 1..63: mol_type = other DNA

SEQ ID NO: 5844 - DNA, 90 bp, synthetic construct; identical to SEQ ID NO: 1724
  misc_feature 1..90: note = Description of Artificial Sequence: Synthetic construct
  source 1..90: mol_type = other DNA

SEQ ID NO: 5845 - DNA, 27 bp, Homo sapiens
  source 1..27: mol_type = other DNA
agcgccaggaatcgccagaagcggtcc

SEQ ID NO: 5846 - DNA, 24 bp, Homo sapiens
  source 1..24: mol_type = other DNA
gcccggaatagacagaagagatct

SEQ ID NO: 5847 - DNA, 36 bp, synthetic construct; identical to SEQ ID NO: 1337
  misc_feature 1..36: note = Description of Artificial Sequence: Synthetic cleavage site
  source 1..36: mol_type = other DNA

SEQ ID NO: 5848 - DNA, 36 bp, synthetic construct; identical to SEQ ID NO: 1338
  misc_feature 1..36: note = Description of Artificial Sequence: Synthetic cleavage site
  source 1..36: mol_type = other DNA

SEQ ID NO: 5849 - DNA, 36 bp, synthetic construct; identical to SEQ ID NO: 1339
  misc_feature 1..36: note = Description of Artificial Sequence: Synthetic cleavage site
  source 1..36: mol_type = other DNA

SEQ ID NO: 5850 - DNA, 42 bp, synthetic construct; identical to SEQ ID NO: 2359
  misc_feature 1..42: note = Description of Artificial Sequence: Synthetic cleavage site
  source 1..42: mol_type = other DNA

SEQ ID NO: 5851 - DNA, 57 bp, synthetic construct; identical to SEQ ID NO: 2361
  misc_feature 1..57: note = Description of Artificial Sequence: Synthetic cleavage site
  source 1..57: mol_type = other DNA

SEQ ID NO: 5852 - DNA, 27 bp, Homo sapiens
  source 1..27: mol_type = other DNA
agcgccaggaatcgccagaagcggtcc

SEQ ID NO: 5853 - DNA, 24 bp, Homo sapiens
  source 1..24: mol_type = other DNA
gcccggaatagacagaagagatct

SEQ ID NO: 5854 - DNA, 36 bp, synthetic construct; identical to SEQ ID NO: 1337
  misc_feature 1..36: note = Description of Artificial Sequence: Synthetic cleavage site
  source 1..36: mol_type = other DNA

SEQ ID NO: 5855 - DNA, 36 bp, synthetic construct; identical to SEQ ID NO: 1338
  misc_feature 1..36: note = Description of Artificial Sequence: Synthetic cleavage site
  source 1..36: mol_type = other DNA

SEQ ID NO: 5856 - DNA, 36 bp, synthetic construct; identical to SEQ ID NO: 1339
  misc_feature 1..36: note = Description of Artificial Sequence: Synthetic cleavage site
  source 1..36: mol_type = other DNA

SEQ ID NO: 5857 - DNA, 57 bp, synthetic construct; identical to SEQ ID NO: 2361
  misc_feature 1..57: note = Description of Artificial Sequence: Synthetic cleavage site
  source 1..57: mol_type = other DNA

SEQ ID NO: 5858 - DNA, 42 bp, synthetic construct; identical to SEQ ID NO: 2359
  misc_feature 1..42: note = Description of Artificial Sequence: Synthetic cleavage site
  source 1..42: mol_type = other DNA

SEQ ID NO: 5859 - DNA, 60 bp, synthetic construct; identical to SEQ ID NO: 1806
  misc_feature 1..60: note = Description of Artificial Sequence: Synthetic cleavage site
  source 1..60: mol_type = other DNA

SEQ ID NO: 5860 - DNA, 27 bp, Homo sapiens
  source 1..27: mol_type = other DNA
agcgccaggaatcgccagaagcggtcc

SEQ ID NO: 5861 - DNA, 24 bp, Homo sapiens
  source 1..24: mol_type = other DNA
gcccggaatagacagaagagatct

SEQ ID NO: 5862 - DNA, 36 bp, synthetic construct; identical to SEQ ID NO: 1337
  misc_feature 1..36: note = Description of Artificial Sequence: Synthetic cleavage site
  source 1..36: mol_type = other DNA

SEQ ID NO: 5863 - DNA, 36 bp, synthetic construct; identical to SEQ ID NO: 1338
  misc_feature 1..36: note = Description of Artificial Sequence: Synthetic cleavage site
  source 1..36: mol_type = other DNA

SEQ ID NO: 5864 - DNA, 36 bp, synthetic construct; identical to SEQ ID NO: 1339
  misc_feature 1..36: note = Description of Artificial Sequence: Synthetic cleavage site
  source 1..36: mol_type = other DNA

SEQ ID NO: 5865 - DNA, 27 bp, synthetic construct
  misc_feature 1..27: note = Description of Artificial Sequence: Synthetic HA Tag
  source 1..27: mol_type = other DNA
tacccatacgatgttccagattacgct

SEQ ID NO: 5866 - DNA, 27 bp, synthetic construct
  misc_feature 1..27: note = Description of Artificial Sequence: Synthetic HA Tag
  source 1..27: mol_type = other DNA
tatccttacgatgtgcccgactatgct

SEQ ID NO: 5867 - DNA, 27 bp, synthetic construct
  misc_feature 1..27: note = Description of Artificial Sequence: Synthetic HA Tag
  source 1..27: mol_type = other DNA
tatccgtacgacgtaccagactacgca

SEQ ID NO: 5868 - DNA, 12 bp, synthetic construct
  misc_feature 1..12: note = Description of Artificial Sequence: Synthetic linker
  source 1..12: mol_type = other DNA
ggaggatctgga

SEQ ID NO: 5869 - DNA, 15 bp, synthetic construct
  misc_feature 1..15: note = Description of Artificial Sequence: Synthetic linker
  source 1..15: mol_type = other DNA
ggaggcagcggagga

SEQ ID NO: 5870 - DNA, 15 bp, synthetic construct
  misc_feature 1..15: note = Description of Artificial Sequence: Synthetic linker
  source 1..15: mol_type = other DNA
ggaggctctggagga

SEQ ID NO: 5871 - DNA, 15 bp, synthetic construct
  misc_feature 1..15: note = Description of Artificial Sequence: Synthetic linker
  source 1..15: mol_type = other DNA
ggaggctccggcgga

SEQ ID NO: 5872 - DNA, 15 bp, synthetic construct
  misc_feature 1..15: note = Description of Artificial Sequence: Synthetic linker
  source 1..15: mol_type = other DNA
ggaggatccggaggc

SEQ ID NO: 5873 - DNA, 15 bp, synthetic construct
  misc_feature 1..15: note = Description of Artificial Sequence: Synthetic linker
  source 1..15: mol_type = other DNA
ggaggatctggagga

SEQ ID NO: 5874 - DNA, 18 bp, synthetic construct
  misc_feature 1..18: note = Description of Artificial Sequence: Synthetic oligonucleotide
  source 1..18: mol_type = other DNA
ggtggctctggtggtggt

SEQ ID NO: 5875 - DNA, 18 bp, synthetic construct
  misc_feature 1..18: note = Description of Artificial Sequence: Synthetic oligonucleotide
  source 1..18: mol_type = other DNA
ggaggtagtggtggaggc

SEQ ID NO: 5876 - DNA, 15 bp, synthetic construct
  misc_feature 1..15: note = Description of Artificial Sequence: Synthetic linker
  source 1..15: mol_type = other DNA
tcaggtggcggtagt

SEQ ID NO: 5877 - DNA, 27 bp, synthetic construct
  misc_feature 1..27: note = Description of Artificial Sequence: Synthetic linker
  source 1..27: mol_type = other DNA
ggaggtagtggtggaggcagtggtgga

SEQ ID NO: 5878 - DNA, 78 bp, synthetic construct; identical to SEQ ID NO: 1647
  misc_feature 1..78: note = Description of Artificial Sequence: Synthetic linker
  source 1..78: mol_type = other DNA

SEQ ID NO: 5879 - DNA, 18 bp, synthetic construct
  misc_feature 1..18: note = Description of Artificial Sequence: Synthetic linker
  source 1..18: mol_type = other DNA
gagttcagcaccgagttt

SEQ ID NO: 5880 - DNA, 18 bp, synthetic construct
  misc_feature 1..18: note = Description of Artificial Sequence: Synthetic linker
  source 1..18: mol_type = other DNA
gagttctccaccgagttc

SEQ ID NO: 5881 - DNA, 15 bp, synthetic construct
  misc_feature 1..15: note = Description of Artificial Sequence: Synthetic linker
  source 1..15: mol_type = other DNA
agcggcggtggcagc

SEQ ID NO: 5882 - DNA, 39 bp, synthetic construct; identical to SEQ ID NO: 2274
  misc_feature 1..39: note = Description of Artificial Sequence: Synthetic linker
  source 1..39: mol_type = other DNA

SEQ ID NO: 5883 - DNA, 105 bp, synthetic construct; identical to SEQ ID NO: 2419
  misc_feature 1..105: note = Description of Artificial Sequence: Synthetic linker
  source 1..105: mol_type = other DNA

SEQ ID NO: 5884 - DNA, 24 bp, synthetic construct
  misc_feature 1..24: note = Description of Artificial Sequence: Synthetic linker
  source 1..24: mol_type = other DNA
gactacaaagacgatgacgacaag

SEQ ID NO: 5885 - DNA, 102 bp, synthetic construct; identical to SEQ ID NO: 1925
  misc_feature 1..102: note = Description of Artificial Sequence: Synthetic linker
  source 1..102: mol_type = other DNA

SEQ ID NO: 5886 - DNA, 45 bp, synthetic construct; identical to SEQ ID NO: 1636
  misc_feature 1..45: note = Description of Artificial Sequence: Synthetic linker
  source 1..45: mol_type = other DNA

SEQ ID NO: 5887 - DNA, 45 bp, synthetic construct; identical to SEQ ID NO: 1637
  misc_feature 1..45: note = Description of Artificial Sequence: Synthetic linker
  source 1..45: mol_type = other DNA

SEQ ID NO: 5888 - DNA, 45 bp, synthetic construct; identical to SEQ ID NO: 1638
  misc_feature 1..45: note = Description of Artificial Sequence: Synthetic linker
  source 1..45: mol_type = other DNA

SEQ ID NO: 5889 - DNA, 45 bp, synthetic construct; identical to SEQ ID NO: 1639
  misc_feature 1..45: note = Description of Artificial Sequence: Synthetic linker
  source 1..45: mol_type = other DNA

SEQ ID NO: 5890 - DNA, 45 bp, synthetic construct; identical to SEQ ID NO: 1640
  misc_feature 1..45: note = Description of Artificial Sequence: Synthetic linker
  source 1..45: mol_type = other DNA

SEQ ID NO: 5891 - DNA, 45 bp, synthetic construct; identical to SEQ ID NO: 1641
  misc_feature 1..45: note = Description of Artificial Sequence: Synthetic linker
  source 1..45: mol_type = other DNA

SEQ ID NO: 5892 - DNA, 102 bp, synthetic construct; identical to SEQ ID NO: 2425
  misc_feature 1..102: note = Description of Artificial Sequence: Synthetic linker
  source 1..102: mol_type = other DNA

SEQ ID NO: 5893 - DNA, 66 bp, synthetic construct; identical to SEQ ID NO: 2427
  misc_feature 1..66: note = Description of Artificial Sequence: Synthetic linker
  source 1..66: mol_type = other DNA

SEQ ID NO: 5894 - DNA, 102 bp, synthetic construct; identical to SEQ ID NO: 1925
  misc_feature 1..102: note = Description of Artificial Sequence: Synthetic linker
  source 1..102: mol_type = other DNA

SEQ ID NO: 5895 - DNA, 105 bp, synthetic construct; identical to SEQ ID NO: 2419
  misc_feature 1..105: note = Description of Artificial Sequence: Synthetic Linker sequence
  source 1..105: mol_type = other DNA

SEQ ID NO: 5896 - DNA, 24 bp, synthetic construct
  misc_feature 1..24: note = Description of Artificial Sequence: Synthetic Linker sequence
  source 1..24: mol_type = other DNA
gactacaaagacgatgacgacaag

SEQ ID NO: 5897 - DNA, 102 bp, synthetic construct; identical to SEQ ID NO: 1925
  misc_feature 1..102: note = Description of Artificial Sequence: Synthetic Linker sequence
  source 1..102: mol_type = other DNA

SEQ ID NO: 5898 - DNA, 102 bp, synthetic construct; identical to SEQ ID NO: 2425
  misc_feature 1..102: note = Description of Artificial Sequence: Synthetic Linker sequence
  source 1..102: mol_type = other DNA

SEQ ID NO: 5899 - DNA, 66 bp, synthetic construct; identical to SEQ ID NO: 2427
  misc_feature 1..66: note = Description of Artificial Sequence: Synthetic Linker sequence
  source 1..66: mol_type = other DNA

SEQ ID NO: 5900 - DNA, 60 bp, synthetic construct; identical to SEQ ID NO: 1927
  misc_feature 1..60: note = Description of Artificial Sequence: Synthetic linker
  source 1..60: mol_type = other DNA

SEQ ID NO: 5901 - DNA, 60 bp, synthetic construct; identical to SEQ ID NO: 1927
  misc_feature 1..60: note = Description of Artificial Sequence: Synthetic Linker sequence
  source 1..60: mol_type = other DNA

SEQ ID NO: 5902 - DNA, 39 bp, synthetic construct; identical to SEQ ID NO: 2280
  misc_feature 1..39: note = Description of Artificial Sequence: Synthetic Linker sequence
  source 1..39: mol_type = other DNA

SEQ ID NO: 5903 - DNA, 12 bp, synthetic construct
  misc_feature 1..12: note = Description of Artificial Sequence: Synthetic Linker sequence
  source 1..12: mol_type = other DNA
gctagcttcgaa

SEQ ID NO: 5904 - DNA, 12 bp, synthetic construct
  misc_feature 1..12: note = Description of Artificial Sequence: Synthetic Linker sequence
  source 1..12: mol_type = other DNA
ggaggatctgga

SEQ ID NO: 5905 - DNA, 15 bp, synthetic construct
  misc_feature 1..15: note = Description of Artificial Sequence: Synthetic Linker sequence
  source 1..15: mol_type = other DNA
ggaggcagcggagga

SEQ ID NO: 5906 - DNA, 15 bp, synthetic construct
  misc_feature 1..15: note = Description of Artificial Sequence: Synthetic Linker sequence
  source 1..15: mol_type = other DNA
ggaggctctggagga

SEQ ID NO: 5907 - DNA, 15 bp, synthetic construct
  misc_feature 1..15: note = Description of Artificial Sequence: Synthetic Linker sequence
  source 1..15: mol_type = other DNA
ggaggctccggcgga

SEQ ID NO: 5908 - DNA, 15 bp, synthetic construct
  misc_feature 1..15: note = Description of Artificial Sequence: Synthetic Linker sequence
  source 1..15: mol_type = other DNA
ggaggatccggaggc

SEQ ID NO: 5909 - DNA, 15 bp, synthetic construct
  misc_feature 1..15: note = Description of Artificial Sequence: Synthetic Linker sequence
  source 1..15: mol_type = other DNA
ggaggatctggagga

SEQ ID NO: 5910 - DNA, 18 bp, synthetic construct
  misc_feature 1..18: note = Description of Artificial Sequence: Synthetic Linker sequence
  source 1..18: mol_type = other DNA
ggtggctctggtggtggt

SEQ ID NO: 5911 - DNA, 18 bp, synthetic construct
  misc_feature 1..18: note = Description of Artificial Sequence: Synthetic Linker sequence
  source 1..18: mol_type = other DNA
ggaggtagtggtggaggc

SEQ ID NO: 5912 - DNA, 15 bp, synthetic construct
  misc_feature 1..15: note = Description of Artificial Sequence: Synthetic Linker sequence
  source 1..15: mol_type = other DNA
tcaggtggcggtagt

SEQ ID NO: 5913 - DNA, 15 bp, synthetic construct
  misc_feature 1..15: note = Description of Artificial Sequence: Synthetic Linker sequence
  source 1..15: mol_type = other DNA
agcggcggtggcagc

SEQ ID NO: 5914 - DNA, 15 bp, synthetic construct
  misc_feature 1..15: note = Description of Artificial Sequence: Synthetic Linker sequence
  source 1..15: mol_type = other DNA
tcaggcggggggagt

SEQ ID NO: 5915 - DNA, 27 bp, synthetic construct
  misc_feature 1..27: note = Description of Artificial Sequence: Synthetic Linker sequence
  source 1..27: mol_type = other DNA
ggaggtagtggtggaggcagtggtgga

SEQ ID NO: 5916 - DNA, 45 bp, synthetic construct; identical to SEQ ID NO: 1636
  misc_feature 1..45: note = Description of Artificial Sequence: Synthetic Linker sequence
  source 1..45: mol_type = other DNA

SEQ ID NO: 5917 - DNA, 45 bp, synthetic construct; identical to SEQ ID NO: 1637
  misc_feature 1..45: note = Description of Artificial Sequence: Synthetic Linker sequence
  source 1..45: mol_type = other DNA

SEQ ID NO: 5918 - protein, 26 aa, synthetic construct
  REGION 1..26: note = Description of Artificial Sequence: Synthetic Linker sequence
SGGGSGGGGSGGGGSGGGGSGGGSLQ

SEQ ID NO: 5919 - DNA, 45 bp, synthetic construct; identical to SEQ ID NO: 1639
  misc_feature 1..45: note = Description of Artificial Sequence: Synthetic signal sequence
  source 1..45: mol_type = other DNA

SEQ ID NO: 5920 - DNA, 45 bp, synthetic construct; identical to SEQ ID NO: 1640
  misc_feature 1..45: note = Description of Artificial Sequence: Synthetic Linker sequence
  source 1..45: mol_type = other DNA

SEQ ID NO: 5921 - DNA, 45 bp, synthetic construct; identical to SEQ ID NO: 1641
  misc_feature 1..45: note = Description of Artificial Sequence: Synthetic Linker sequence
  source 1..45: mol_type = other DNA

SEQ ID NO: 5922 - DNA, 78 bp, synthetic construct; identical to SEQ ID NO: 1647
  misc_feature 1..78: note = Description of Artificial Sequence: Synthetic Linker sequence
  source 1..78: mol_type = other DNA

SEQ ID NO: 5923 - DNA, 78 bp, synthetic construct; identical to SEQ ID NO: 1648
  misc_feature 1..78: note = Description of Artificial Sequence: Synthetic Linker sequence
  source 1..78: mol_type = other DNA

SEQ ID NO: 5924 - DNA, 78 bp, synthetic construct; identical to SEQ ID NO: 1649
  misc_feature 1..78: note = Description of Artificial Sequence: Synthetic Linker sequence
  source 1..78: mol_type = other DNA

SEQ ID NO: 5925 - DNA, 78 bp, synthetic construct; identical to SEQ ID NO: 1650
  misc_feature 1..78: note = Description of Artificial Sequence: Synthetic Linker sequence
  source 1..78: mol_type = other DNA

SEQ ID NO: 5926 - DNA, 78 bp, synthetic construct; identical to SEQ ID NO: 1651
  misc_feature 1..78: note = Description of Artificial Sequence: Synthetic Linker sequence
  source 1..78: mol_type = other DNA

SEQ ID NO: 5927 - DNA, 78 bp, synthetic construct; identical to SEQ ID NO: 1652
  misc_feature 1..78: note = Description of Artificial Sequence: Synthetic Linker sequence
  source 1..78: mol_type = other DNA

SEQ ID NO: 5928 - DNA, 78 bp, synthetic construct; identical to SEQ ID NO: 1650
  misc_feature 1..78: note = Description of Artificial Sequence: Synthetic Linker sequence
  source 1..78: mol_type = other DNA

SEQ ID NO: 5929 - DNA, 18 bp, synthetic construct
  misc_feature 1..18: note = Description of Artificial Sequence: Synthetic Linker sequence
  source 1..18: mol_type = other DNA
gagttcagcaccgagttt

SEQ ID NO: 5930 - DNA, 18 bp, synthetic construct
  misc_feature 1..18: note = Description of Artificial Sequence: Synthetic Linker sequence
  source 1..18: mol_type = other DNA
gagttctccaccgagttc

SEQ ID NO: 5931 - DNA, 39 bp, synthetic construct; identical to SEQ ID NO: 2274
  misc_feature 1..39: note = Description of Artificial Sequence: Synthetic signal sequence
  source 1..39: mol_type = other DNA

SEQ ID NO: 5932 - DNA, 105 bp, synthetic construct; identical to SEQ ID NO: 2419
  misc_feature 1..105: note = Description of Artificial Sequence: Synthetic Linker sequence
  source 1..105: mol_type = other DNA

SEQ ID NO: 5933 - DNA, 24 bp, synthetic construct
  misc_feature 1..24: note = Description of Artificial Sequence: Synthetic Linker sequence
  source 1..24: mol_type = other DNA
gactacaaagacgatgacgacaag

SEQ ID NO: 5934 - DNA, 102 bp, synthetic construct; identical to SEQ ID NO: 1925
  misc_feature 1..102: note = Description of Artificial Sequence: Synthetic Linker sequence
  source 1..102: mol_type = other DNA

SEQ ID NO: 5935 - DNA, 102 bp, synthetic construct; identical to SEQ ID NO: 2425
  misc_feature 1..102: note = Description of Artificial Sequence: Synthetic Linker sequence
  source 1..102: mol_type = other DNA

SEQ ID NO: 5936 - DNA, 66 bp, synthetic construct; identical to SEQ ID NO: 2427
  misc_feature 1..66: note = Description of Artificial Sequence: Synthetic Linker sequence
  source 1..66: mol_type = other DNA

SEQ ID NO: 5937 - DNA, 60 bp, synthetic construct; identical to SEQ ID NO: 1927
  misc_feature 1..60: note = Description of Artificial Sequence: Synthetic Linker sequence
  source 1..60: mol_type = other DNA

SEQ ID NO: 5938 - DNA, 39 bp, synthetic construct; identical to SEQ ID NO: 2280
  misc_feature 1..39: note = Description of Artificial Sequence: Synthetic Linker sequence
  source 1..39: mol_type = other DNA

SEQ ID NO: 5939 - DNA, 12 bp, synthetic construct
  misc_feature 1..12: note = Description of Artificial Sequence: Synthetic Linker sequence
  source 1..12: mol_type = other DNA
gctagcttcgaa

SEQ ID NO: 5940 - DNA, 60 bp, synthetic construct; identical to SEQ ID NO: 1806
  misc_feature 1..60: note = Description of Artificial Sequence: Synthetic Cleavable peptide
  source 1..60: mol_type = other DNA

SEQ ID NO: 5941 - DNA, 561 bp, synthetic construct; identical to SEQ ID NO: 72
  misc_feature 1..561: note = Description of Artificial Sequence: Synthetic destabilizing domain (DD)
  source 1..561: mol_type = other DNA

SEQ ID NO: 5942 - DNA, 561 bp, synthetic construct; identical to SEQ ID NO: 73
  misc_feature 1..561: note = Description of Artificial Sequence: Synthetic destabilizing domain (DD)
  source 1..561: mol_type = other DNA

SEQ ID NO: 5943 - DNA, 561 bp, synthetic construct; identical to SEQ ID NO: 74
  misc_feature 1..561: note = Description of Artificial Sequence: Synthetic destabilizing domain (DD)
  source 1..561: mol_type = other DNA

SEQ ID NO: 5944 - DNA, 561 bp, synthetic construct; identical to SEQ ID NO: 75
  misc_feature 1..561: note = Description of Artificial Sequence: Synthetic destabilizing domain (DD)
  source 1..561: mol_type = other DNA

SEQ ID NO: 5945 - DNA, 561 bp, synthetic construct; identical to SEQ ID NO: 76
  misc_feature 1..561: note = Description of Artificial Sequence: Synthetic destabilizing domain (DD)
  source 1..561: mol_type = other DNA

SEQ ID NO: 5946 - DNA, 561 bp, synthetic construct; identical to SEQ ID NO: 77
  misc_feature 1..561: note = Description of Artificial Sequence: Synthetic destabilizing domain (DD)
  source 1..561: mol_type = other DNA

SEQ ID NO: 5947 - DNA, 561 bp, synthetic construct; identical to SEQ ID NO: 78
  misc_feature 1..561: note = Description of Artificial Sequence: Synthetic destabilizing domain (DD)
  source 1..561: mol_type = other DNA

SEQ ID NO: 5948 - DNA, 561 bp, synthetic construct; identical to SEQ ID NO: 79
  misc_feature 1..561: note = Description of Artificial Sequence: Synthetic destabilizing domain (DD)
  source 1..561: mol_type = other DNA

SEQ ID NO: 5949 - DNA, 561 bp, synthetic construct; identical to SEQ ID NO: 80
  misc_feature 1..561: note = Description of Artificial Sequence: Synthetic destabilizing domain (DD)
  source 1..561: mol_type = other DNA

SEQ ID NO: 5950 - DNA, 561 bp, synthetic construct; identical to SEQ ID NO: 81
  misc_feature 1..561: note = Description of Artificial Sequence: Synthetic destabilizing domain (DD)
  source 1..561: mol_type = other DNA

SEQ ID NO: 5951 - DNA, 561 bp, synthetic construct; identical to SEQ ID NO: 82
  misc_feature 1..561: note = Description of Artificial Sequence: Synthetic destabilizing domain (DD)
  source 1..561: mol_type = other DNA

SEQ ID NO: 5952 - DNA, 561 bp, synthetic construct; identical to SEQ ID NO: 83
  misc_feature 1..561: note = Description of Artificial Sequence: Synthetic destabilizing domain (DD)
  source 1..561: mol_type = other DNA

SEQ ID NO: 5953 - DNA, 561 bp, synthetic construct; identical to SEQ ID NO: 84
  misc_feature 1..561: note = Description of Artificial Sequence: Synthetic destabilizing domain (DD)
  source 1..561: mol_type = other DNA

SEQ ID NO: 5954 - DNA, 561 bp, synthetic construct; identical to SEQ ID NO: 85
  misc_feature 1..561: note = Description of Artificial Sequence: Synthetic destabilizing domain (DD)
  source 1..561: mol_type = other DNA

SEQ ID NO: 5955 - DNA, 558 bp, synthetic construct; identical to SEQ ID NO: 86
  misc_feature 1..558: note = Description of Artificial Sequence: Synthetic destabilizing domain (DD)
  source 1..558: mol_type = other DNA

SEQ ID NO: 5956 - DNA, 2034 bp, synthetic construct; identical to SEQ ID NO: 165
  misc_feature 1..2034: note = Description of Artificial Sequence: Synthetic Construct
  source 1..2034: mol_type = other DNA

SEQ ID NO: 5957 - DNA, 2034 bp, synthetic construct; identical to SEQ ID NO: 166
  misc_feature 1..2034: note = Description of Artificial Sequence: Synthetic Construct
  source 1..2034: mol_type = other DNA

SEQ ID NO: 5958 - DNA, 2034 bp, synthetic construct; identical to SEQ ID NO: 167
  misc_feature 1..2034: note = Description of Artificial Sequence: Synthetic Construct
  source 1..2034: mol_type = other DNA

SEQ ID NO: 5959 - DNA, 2034 bp, synthetic construct; identical to SEQ ID NO: 1707
  misc_feature 1..2034: note = Description of Artificial Sequence: Synthetic Construct
  source 1..2034: mol_type = other DNA

SEQ ID NO: 5960 - DNA, 2062 bp, synthetic construct; identical to SEQ ID NO: 174
  misc_feature 1..2062: note = Description of Artificial Sequence: Synthetic Construct
  source 1..2062: mol_type = other DNA

SEQ ID NO: 5961 - DNA, 2062 bp, synthetic construct; identical to SEQ ID NO: 175
  misc_feature 1..2062: note = Description of Artificial Sequence: Synthetic Construct
  source 1..2062: mol_type = other DNA

SEQ ID NO: 5962 - DNA, 2061 bp, synthetic construct; identical to SEQ ID NO: 176
  misc_feature 1..2061: note = Description of Artificial Sequence: Synthetic Construct
  source 1..2061: mol_type = other DNA

SEQ ID NO: 5963 - DNA, 2061 bp, synthetic construct; identical to SEQ ID NO: 177
  misc_feature 1..2061: note = Description of Artificial Sequence: Synthetic Construct
  source 1..2061: mol_type = other DNA

SEQ ID NO: 5964 - DNA, 1188 bp, synthetic construct; identical to SEQ ID NO: 169
  misc_feature 1..1188: note = Description of Artificial Sequence: Synthetic polynucleotide
  source 1..1188: mol_type = other DNA

SEQ ID NO: 5965 - DNA, 1752 bp, synthetic construct; identical to SEQ ID NO: 170
  misc_feature 1..1752: note = Description of Artificial Sequence: Synthetic polynucleotide
  source 1..1752: mol_type = other DNA

SEQ ID NO: 5966 - DNA, 1752 bp, synthetic construct; identical to SEQ ID NO: 171
  misc_feature 1..1752: note = Description of Artificial Sequence: Synthetic polynucleotide
  source 1..1752: mol_type = other DNA

SEQ ID NO: 5967 - DNA, 1623 bp, synthetic construct; identical to SEQ ID NO: 172
  misc_feature 1..1623: note = Description of Artificial Sequence: Synthetic polynucleotide
  source 1..1623: mol_type = other DNA

SEQ ID NO: 5968 - DNA, 2214 bp, synthetic construct; identical to SEQ ID NO: 173
  misc_feature 1..2214: note = Description of Artificial Sequence: Synthetic polynucleotide
  source 1..2214: mol_type = other DNA

SEQ ID NO: 5969 - DNA, 1824 bp, synthetic construct; identical to SEQ ID NO: 178
  misc_feature 1..1824: note = Description of Artificial Sequence: Synthetic polynucleotide
  source 1..1824: mol_type = other DNA

SEQ ID NO: 5970 - DNA, 1824 bp, synthetic construct; identical to SEQ ID NO: 179
  misc_feature 1..1824: note = Description of Artificial Sequence: Synthetic polynucleotide
  source 1..1824: mol_type = other DNA

SEQ ID NO: 5971 - DNA, 1824 bp, synthetic construct; identical to SEQ ID NO: 180
  misc_feature 1..1824: note = Description of Artificial Sequence: Synthetic polynucleotide
  source 1..1824: mol_type = other DNA

SEQ ID NO: 5972 - DNA, 321 bp, synthetic construct; identical to SEQ ID NO: 1664
  misc_feature 1..321: note = Description of Artificial Sequence: Synthetic Destabilizing Domain (DD)
  source 1..321: mol_type = other DNA

SEQ ID NO: 5973 - DNA, 321 bp, synthetic construct; identical to SEQ ID NO: 1665
  misc_feature 1..321: note = Description of Artificial Sequence: Synthetic Destabilizing Domain (DD)
  source 1..321: mol_type = other DNA

SEQ ID NO: 5974 - DNA, 321 bp, synthetic construct; identical to SEQ ID NO: 1666
  misc_feature 1..321: note = Description of Artificial Sequence: Synthetic Destabilizing Domain (DD)
  source 1..321: mol_type = other DNA

SEQ ID NO: 5975 - DNA, 324 bp, synthetic construct; identical to SEQ ID NO: 1669
  misc_feature 1..324: note = Description of Artificial Sequence: Synthetic Destabilizing Domain (DD)
  source 1..324: mol_type = other DNA

SEQ ID NO: 5976 - DNA, 324 bp, synthetic construct; identical to SEQ ID NO: 1670
  misc_feature 1..324: note = Description of Artificial Sequence: Synthetic Destabilizing Domain (DD)
  source 1..324: mol_type = other DNA

SEQ ID NO: 5977 - DNA, 324 bp, synthetic construct; identical to SEQ ID NO: 1671
  misc_feature 1..324: note = Description of Artificial Sequence: Synthetic Destabilizing Domain (DD)
  source 1..324: mol_type = other DNA

SEQ ID NO: 5978 - DNA, 324 bp, synthetic construct; identical to SEQ ID NO: 1672
  misc_feature 1..324: note = Description of Artificial Sequence: Synthetic Destabilizing Domain (DD)
  source 1..324: mol_type = other DNA

SEQ ID NO: 5979 - DNA, 321 bp, synthetic construct; identical to SEQ ID NO: 1667
  misc_feature 1..321: note = Description of Artificial Sequence: Synthetic Destabilizing Domain (DD)
  source 1..321: mol_type = other DNA

SEQ ID NO: 5980 - DNA, 474 bp, synthetic construct; identical to SEQ ID NO: 1680
  misc_feature 1..474: note = Description of Artificial Sequence: Synthetic Destabilizing Domain (DD)
  source 1..474: mol_type = other DNA

SEQ ID NO: 5981 - DNA, 321 bp, synthetic construct; identical to SEQ ID NO: 1668
  misc_feature 1..321: note = Description of Artificial Sequence: Synthetic Destabilizing Domain (DD)
  source 1..321: mol_type = other DNA

SEQ ID NO: 5982 - DNA, 321 bp, synthetic construct; identical to SEQ ID NO: 1673
  misc_feature 1..321: note = Description of Artificial Sequence: Synthetic Destabilizing Domain (DD)
  source 1..321: mol_type = other DNA

SEQ ID NO: 5983 - DNA, 321 bp, synthetic construct; identical to SEQ ID NO: 1674
  misc_feature 1..321: note = Description of Artificial Sequence: Synthetic Destabilizing Domain (DD)
  source 1..321: mol_type = other DNA

SEQ ID NO: 5984 - DNA, 321 bp, synthetic construct; identical to SEQ ID NO: 1675
  misc_feature 1..321: note = Description of Artificial Sequence: Synthetic Destabilizing Domain (DD)
  source 1..321: mol_type = other DNA

SEQ ID NO: 5985 - DNA, 474 bp, synthetic construct; identical to SEQ ID NO: 1679
  misc_feature 1..474: note = Description of Artificial Sequence: Synthetic Destabilizing Domain (DD)
  source 1..474: mol_type = other DNA

SEQ ID NO: 5986 - DNA, 474 bp, synthetic construct; identical to SEQ ID NO: 1676
  misc_feature 1..474: note = Description of Artificial Sequence: Synthetic Destabilizing Domain (DD)
  source 1..474: mol_type = other DNA

SEQ ID NO: 5987 - DNA, 477 bp, synthetic construct; identical to SEQ ID NO: 1677
  misc_feature 1..477: note = Description of Artificial Sequence: Synthetic Destabilizing Domain (DD)
  source 1..477: mol_type = other DNA

SEQ ID NO: 5988 - DNA, 477 bp, synthetic construct; identical to SEQ ID NO: 1682
  misc_feature 1..477: note = Description of Artificial Sequence: Synthetic Destabilizing Domain (DD)
  source 1..477: mol_type = other DNA

SEQ ID NO: 5989 - DNA, 474 bp, synthetic construct; identical to SEQ ID NO: 1678
  misc_feature 1..474: note = Description of Artificial Sequence: Synthetic Destabilizing Domain (DD)
  source 1..474: mol_type = other DNA

SEQ ID NO: 5990 - DNA, 474 bp, synthetic construct; identical to SEQ ID NO: 1683
  misc_feature 1..474: note = Description of Artificial Sequence: Synthetic Destabilizing Domain (DD)
  source 1..474: mol_type = other DNA

SEQ ID NO: 5991 - DNA, 474 bp, synthetic construct; identical to SEQ ID NO: 1680
  misc_feature 1..474: note = Description of Artificial Sequence: Synthetic Destabilizing Domain (DD)
  source 1..474: mol_type = other DNA

SEQ ID NO: 5992 - DNA, 474 bp, synthetic construct; identical to SEQ ID NO: 1681
  misc_feature 1..474: note = Description of Artificial Sequence: Synthetic Destabilizing Domain (DD)
  source 1..474: mol_type = other DNA

SEQ ID NO: 5993 - DNA, 474 bp, synthetic construct; identical to SEQ ID NO: 1684
  misc_feature 1..474: note = Description of Artificial Sequence: Synthetic Destabilizing Domain (DD)
  source 1..474: mol_type = other DNA

SEQ ID NO: 5994 - DNA, 561 bp, synthetic construct; identical to SEQ ID NO: 73
  misc_feature 1..561: note = Description of Artificial Sequence: Synthetic Destabilizing Domain (DD)
  source 1..561: mol_type = other DNA

SEQ ID NO: 5995 - DNA, 558 bp, synthetic construct; identical to SEQ ID NO: 1685
  misc_feature 1..558: note = Description of Artificial Sequence: Synthetic Destabilizing Domain (DD)
  source 1..558: mol_type = other DNA

SEQ ID NO: 5996 - DNA, 561 bp, synthetic construct; identical to SEQ ID NO: 76
  misc_feature 1..561: note = Description of Artificial Sequence: Synthetic Destabilizing Domain (DD)
  source 1..561: mol_type = other DNA

SEQ ID NO: 5997 - DNA, 561 bp, synthetic construct; identical to SEQ ID NO: 77
  misc_feature 1..561: note = Description of Artificial Sequence: Synthetic Destabilizing Domain (DD)
  source 1..561: mol_type = other DNA

SEQ ID NO: 5998 - DNA, 561 bp, synthetic construct; identical to SEQ ID NO: 82
  misc_feature 1..561: note = Description of Artificial Sequence: Synthetic Destabilizing Domain (DD)
  source 1..561: mol_type = other DNA

SEQ ID NO: 5999 - DNA, 561 bp, synthetic construct; identical to SEQ ID NO: 83
  misc_feature 1..561: note = Description of Artificial Sequence: Synthetic Destabilizing Domain (DD)
  source 1..561: mol_type = other DNA

SEQ ID NO: 6000 - DNA, 561 bp, synthetic construct; identical to SEQ ID NO: 84
  misc_feature 1..561: note = Description of Artificial Sequence: Synthetic Destabilizing Domain (DD)
  source 1..561: mol_type = other DNA

SEQ ID NO: 6001 - DNA, 561 bp, synthetic construct; identical to SEQ ID NO: 85
  misc_feature 1..561: note = Description of Artificial Sequence: Synthetic Destabilizing Domain (DD)
  source 1..561: mol_type = other DNA

SEQ ID NO: 6002 - DNA, 558 bp, synthetic construct; identical to SEQ ID NO: 86
  misc_feature 1..558: note = Description of Artificial Sequence: Synthetic Destabilizing Domain (DD)
  source 1..558: mol_type = other DNA

SEQ ID NO: 6003 - DNA, 561 bp, synthetic construct; identical to SEQ ID NO: 74
  misc_feature 1..561: note = Description of Artificial Sequence: Synthetic Destabilizing Domain (DD)
  source 1..561: mol_type = other DNA

SEQ ID NO: 6004 - DNA, 561 bp, synthetic construct; identical to SEQ ID NO: 80
  misc_feature 1..561: note = Description of Artificial Sequence: Synthetic Destabilizing Domain (DD)
  source 1..561: mol_type = other DNA

SEQ ID NO: 6005 - DNA, 561 bp, synthetic construct; identical to SEQ ID NO: 78
  misc_feature 1..561: note = Description of Artificial Sequence: Synthetic Destabilizing Domain (DD)
  source 1..561: mol_type = other DNA

SEQ ID NO: 6006 - DNA, 561 bp, synthetic construct; identical to SEQ ID NO: 75
  misc_feature 1..561: note = Description of Artificial Sequence: Synthetic Destabilizing Domain (DD)
  source 1..561: mol_type = other DNA

SEQ ID NO: 6007 - DNA, 561 bp, synthetic construct; identical to SEQ ID NO: 79
  misc_feature 1..561: note = Description of Artificial Sequence: Synthetic Destabilizing Domain (DD)
  source 1..561: mol_type = other DNA

SEQ ID NO: 6008 - DNA, 561 bp, synthetic construct; identical to SEQ ID NO: 81
  misc_feature 1..561: note = Description of Artificial Sequence: Synthetic Destabilizing Domain (DD)
  source 1..561: mol_type = other DNA

SEQ ID NO: 6009 - DNA, 561 bp, synthetic construct; identical to SEQ ID NO: 93
  misc_feature 1..561: note = Description of Artificial Sequence: Synthetic Destabilizing Domain (DD)
  source 1..561: mol_type = other DNA

SEQ ID NO: 6010 - DNA, 561 bp, synthetic construct; identical to SEQ ID NO: 92
  misc_feature 1..561: note = Description of Artificial Sequence: Synthetic Destabilizing Domain (DD)
  source 1..561: mol_type = other DNA

SEQ ID NO: 6011 - DNA, 561 bp, synthetic construct; identical to SEQ ID NO: 94
  misc_feature 1..561: note = Description of Artificial Sequence: Synthetic Destabilizing Domain (DD)
  source 1..561: mol_type = other DNA

SEQ ID NO: 6012 - DNA, 561 bp, synthetic construct; identical to SEQ ID NO: 90
  misc_feature 1..561: note = Description of Artificial Sequence: Synthetic Destabilizing Domain (DD)
  source 1..561: mol_type = other DNA

SEQ ID NO: 6013 - DNA, 561 bp, synthetic construct; identical to SEQ ID NO: 96
  misc_feature 1..561: note = Description of Artificial Sequence: Synthetic Destabilizing Domain (DD)
  source 1..561: mol_type = other DNA

SEQ ID NO: 6014 - DNA, 561 bp, synthetic construct; identical to SEQ ID NO: 98
  misc_feature 1..561: note = Description of Artificial Sequence: Synthetic Destabilizing Domain (DD)
  source 1..561: mol_type = other DNA

SEQ ID NO: 6015 - DNA, 561 bp, synthetic construct; identical to SEQ ID NO: 110
  misc_feature 1..561: note = Description of Artificial Sequence: Synthetic Destabilizing Domain (DD)
  source 1..561: mol_type = other DNA

SEQ ID NO: 6016 - DNA, 561 bp, synthetic construct; identical to SEQ ID NO: 99
  misc_feature 1..561: note = Description of Artificial Sequence: Synthetic Destabilizing Domain (DD)
  source 1..561: mol_type = other DNA

SEQ ID NO: 6017 - DNA, 561 bp, synthetic construct; identical to SEQ ID NO: 103
  misc_feature 1..561: note = Description of Artificial Sequence: Synthetic Destabilizing Domain (DD)
  source 1..561: mol_type = other DNA

SEQ ID NO: 6018 - DNA, 561 bp, synthetic construct; identical to SEQ ID NO: 97
  misc_feature 1..561: note = Description of Artificial Sequence: Synthetic Destabilizing Domain (DD)
  source 1..561: mol_type = other DNA

SEQ ID NO: 6019 - DNA, 561 bp, synthetic construct; identical to SEQ ID NO: 95
  misc_feature 1..561: note = Description of Artificial Sequence: Synthetic Destabilizing Domain (DD)
  source 1..561: mol_type = other DNA

SEQ ID NO: 6020 - DNA, 561 bp, synthetic construct; identical to SEQ ID NO: 112
  misc_feature 1..561: note = Description of Artificial Sequence: Synthetic Destabilizing Domain (DD)
  source 1..561: mol_type = other DNA

SEQ ID NO: 6021 - DNA, 561 bp, synthetic construct; identical to SEQ ID NO: 111
  misc_feature 1..561: note = Description of Artificial Sequence: Synthetic Destabilizing Domain (DD)
  source 1..561: mol_type = other DNA

SEQ ID NO: 6022 - DNA, 561 bp, synthetic construct; identical to SEQ ID NO: 100
  misc_feature 1..561: note = Description of Artificial Sequence: Synthetic Destabilizing Domain (DD)
  source 1..561: mol_type = other DNA

SEQ ID NO: 6023 - DNA, 561 bp, synthetic construct; identical to SEQ ID NO: 108
  misc_feature 1..561: note = Description of Artificial Sequence: Synthetic Destabilizing Domain (DD)
  source 1..561: mol_type = other DNA

SEQ ID NO: 6024 - DNA, 561 bp, synthetic construct; identical to SEQ ID NO: 113
  misc_feature 1..561: note = Description of Artificial Sequence: Synthetic Destabilizing Domain (DD)
  source 1..561: mol_type = other DNA

SEQ ID NO: 6025 - DNA, 561 bp, synthetic construct; identical to SEQ ID NO: 91
  misc_feature 1..561: note = Description of Artificial Sequence: Synthetic Destabilizing Domain (DD)
  source 1..561: mol_type = other DNA

SEQ ID NO: 6026 - DNA, 561 bp, synthetic construct; identical to SEQ ID NO: 101
  misc_feature 1..561: note = Description of Artificial Sequence: Synthetic Destabilizing Domain (DD)
  source 1..561: mol_type = other DNA

SEQ ID NO: 6027 - DNA, 561 bp, synthetic construct; identical to SEQ ID NO: 105
  misc_feature 1..561: note = Description of Artificial Sequence: Synthetic Destabilizing Domain (DD)
  source 1..561: mol_type = other DNA

SEQ ID NO: 6028 - DNA, 561 bp, synthetic construct; identical to SEQ ID NO: 102
  misc_feature 1..561: note = Description of Artificial Sequence: Synthetic Destabilizing Domain (DD)
  source 1..561: mol_type = other DNA

SEQ ID NO: 6029 - DNA, 561 bp, synthetic construct; identical to SEQ ID NO: 104
  misc_feature 1..561: note = Description of Artificial Sequence: Synthetic Destabilizing Domain (DD)
  source 1..561: mol_type = other DNA

SEQ ID NO: 6030 - DNA, 561 bp, synthetic construct; identical to SEQ ID NO: 106
  misc_feature 1..561: note = Description of Artificial Sequence: Synthetic Destabilizing Domain (DD)
  source 1..561: mol_type = other DNA

SEQ ID NO: 6031 - DNA, 561 bp, synthetic construct; identical to SEQ ID NO: 109
  misc_feature 1..561: note = Description of Artificial Sequence: Synthetic Destabilizing Domain (DD)
  source 1..561: mol_type = other DNA

SEQ ID NO: 6032 - DNA, 561 bp, synthetic construct; identical to SEQ ID NO: 114
  misc_feature 1..561: note = Description of Artificial Sequence: Synthetic Destabilizing Domain (DD)
  source 1..561: mol_type = other DNA

SEQ ID NO: 6033 - DNA, 561 bp, synthetic construct; identical to SEQ ID NO: 115
  misc_feature 1..561: note = Description of Artificial Sequence: Synthetic Destabilizing Domain (DD)
  source 1..561: mol_type = other DNA

SEQ ID NO: 6034 - DNA, 561 bp, synthetic construct; identical to SEQ ID NO: 116
  misc_feature 1..561: note = Description of Artificial Sequence: Synthetic Destabilizing Domain (DD)
  source 1..561: mol_type = other DNA

SEQ ID NO: 6035 - DNA, 561 bp, synthetic construct; identical to SEQ ID NO: 117
  misc_feature 1..561: note = Description of Artificial Sequence: Synthetic Destabilizing Domain (DD)
  source 1..561: mol_type = other DNA

SEQ ID NO: 6036 - DNA, 561 bp, synthetic construct; identical to SEQ ID NO: 118
  misc_feature 1..561: note = Description of Artificial Sequence: Synthetic Destabilizing Domain (DD)
  source 1..561: mol_type = other DNA

SEQ ID NO: 6037 - DNA, 561 bp, synthetic construct; identical to SEQ ID NO: 119
  misc_feature 1..561: note = Description of Artificial Sequence: Synthetic Destabilizing Domain (DD)
  source 1..561: mol_type = other DNA

SEQ ID NO: 6038 - DNA, 561 bp, synthetic construct; identical to SEQ ID NO: 120
  misc_feature 1..561: note = Description of Artificial Sequence: Synthetic Destabilizing Domain (DD)
  source 1..561: mol_type = other DNA

SEQ ID NO: 6039 - DNA, 561 bp, synthetic construct; identical to SEQ ID NO: 121
  misc_feature 1..561: note = Description of Artificial Sequence: Synthetic Destabilizing Domain (DD)
  source 1..561: mol_type = other DNA

SEQ ID NO: 6040 - DNA, 561 bp, synthetic construct; identical to SEQ ID NO: 122
  misc_feature 1..561: note = Description of Artificial Sequence: Synthetic Destabilizing Domain (DD)
  source 1..561: mol_type = other DNA

SEQ ID NO: 6041 - DNA, 561 bp, synthetic construct; identical to SEQ ID NO: 123
  misc_feature 1..561: note = Description of Artificial Sequence: Synthetic Destabilizing Domain (DD)
  source 1..561: mol_type = other DNA

SEQ ID NO: 6042 - DNA, 561 bp, synthetic construct; identical to SEQ ID NO: 124
  misc_feature 1..561: note = Description of Artificial Sequence: Synthetic Destabilizing Domain (DD)
  source 1..561: mol_type = other DNA

SEQ ID NO: 6043 - DNA, 558 bp, synthetic construct; identical to SEQ ID NO: 125
  misc_feature 1..558: note = Description of Artificial Sequence: Synthetic Destabilizing Domain (DD)
  source 1..558: mol_type = other DNA

SEQ ID NO: 6044 - DNA, 558 bp, synthetic construct; identical to SEQ ID NO: 126
  misc_feature 1..558: note = Description of Artificial Sequence: Synthetic Destabilizing Domain (DD)
  source 1..558: mol_type = other DNA

SEQ ID NO: 6045 - DNA, 561 bp, synthetic construct; identical to SEQ ID NO: 1944
  misc_feature 1..561: note = Description of Artificial Sequence: Synthetic Destabilizing Domain (DD)
  source 1..561: mol_type = other DNA

SEQ ID NO: 6046 - DNA, 561 bp, synthetic construct; identical to SEQ ID NO: 1944
  misc_feature 1..561: note = Description of Artificial Sequence: Synthetic Destabilizing Domain (DD)
  source 1..561: mol_type = other DNA

SEQ ID NO: 6047 - DNA, 558 bp, synthetic construct; identical to SEQ ID NO: 1943
  misc_feature 1..558: note = Description of Artificial Sequence: Synthetic Destabilizing Domain (DD)
  source 1..558: mol_type = other DNA

SEQ ID NO: 6048 - DNA, 561 bp, synthetic construct; identical to SEQ ID NO: 1688
  misc_feature 1..561: note = Description of Artificial Sequence: Synthetic Destabilizing Domain (DD)
  source 1..561: mol_type = other DNA

SEQ ID NO: 6049 - DNA, 558 bp, synthetic construct; identical to SEQ ID NO: 1689
  misc_feature 1..558: note = Description of Artificial Sequence: Synthetic Destabilizing Domain (DD)
  source 1..558: mol_type = other DNA

SEQ ID NO: 6050 - DNA, 561 bp, synthetic construct; identical to SEQ ID NO: 1694
  misc_feature 1..561: note = Description of Artificial Sequence: Synthetic Destabilizing Domain (DD)
  source 1..561: mol_type = other DNA

SEQ ID NO: 6051 - DNA, 558 bp, synthetic construct; identical to SEQ ID NO: 1695
  misc_feature 1..558: note = Description of Artificial Sequence: Synthetic Destabilizing Domain (DD)
  source 1..558: mol_type = other DNA

SEQ ID NO: 6052 - DNA, 558 bp, synthetic construct; identical to SEQ ID NO: 1946
  misc_feature 1..558: note = Description of Artificial Sequence: Synthetic Destabilizing Domain (DD)
  source 1..558: mol_type = other DNA

SEQ ID NO: 6053 - DNA, 558 bp, synthetic construct; identical to SEQ ID NO: 1948
  misc_feature 1..558: note = Description of Artificial Sequence: Synthetic Destabilizing Domain (DD)
  source 1..558: mol_type = other DNA

SEQ ID NO: 6054 - DNA, 558 bp, synthetic construct; identical to SEQ ID NO: 1820
  misc_feature 1..558: note = Description of Artificial Sequence: Synthetic Destabilizing Domain (DD)
  source 1..558: mol_type = other DNA

SEQ ID NO: 6055 - DNA, 561 bp, synthetic construct; identical to SEQ ID NO: 107
  misc_feature 1..561: note = Description of Artificial Sequence: Synthetic Destabilizing Domain (DD)
  source 1..561: mol_type = other DNA

SEQ ID NO: 6056 - DNA, 558 bp, synthetic construct; identical to SEQ ID NO: 1686
  misc_feature 1..558: note = Description of Artificial Sequence: Synthetic Destabilizing Domain (DD)
  source 1..558: mol_type = other DNA

SEQ ID NO: 6057 - DNA, 558 bp, synthetic construct; identical to SEQ ID NO: 1690
  misc_feature 1..558: note = Description of Artificial Sequence: Synthetic Destabilizing Domain (DD)
  source 1..558: mol_type = other DNA

SEQ ID NO: 6058 - DNA, 558 bp, synthetic construct; identical to SEQ ID NO: 1692
  misc_feature 1..558: note = Description of Artificial Sequence: Synthetic Destabilizing Domain (DD)
  source 1..558: mol_type = other DNA

SEQ ID NO: 6059 - DNA, 558 bp, synthetic construct; identical to SEQ ID NO: 1696
  misc_feature 1..558: note = Description of Artificial Sequence: Synthetic Destabilizing Domain (DD)
  source 1..558: mol_type = other DNA

SEQ ID NO: 6060 - DNA, 1461 bp, synthetic construct; identical to SEQ ID NO: 1697
  misc_feature 1..1461: note = Description of Artificial Sequence: Synthetic Construct
  source 1..1461: mol_type = other DNA

SEQ ID NO: 6061 - DNA, 1782 bp, synthetic construct; identical to SEQ ID NO: 1698
  misc_feature 1..1782: note = Description of Artificial Sequence: Synthetic Construct
  source 1..1782: mol_type = other DNA

SEQ ID NO: 6062 - DNA, 1935 bp, synthetic construct; identical to SEQ ID NO: 1699
  misc_feature 1..1935: note = Description of Artificial Sequence: Synthetic Construct
  source 1..1935: mol_type = other DNA

SEQ ID NO: 6063 - DNA, 1782 bp, synthetic construct; identical to SEQ ID NO: 1700
  misc_feature 1..1782: note = Description of Artificial Sequence: Synthetic Construct
  source 1..1782: mol_type = other DNA

SEQ ID NO: 6064 - DNA, 1935 bp, synthetic construct; identical to SEQ ID NO: 1701
  misc_feature 1..1935: note = Description of Artificial Sequence: Synthetic Construct
  source 1..1935: mol_type = other DNA

SEQ ID NO: 6065 - DNA, 1950 bp, synthetic construct; identical to SEQ ID NO: 1702
  misc_feature 1..1950: note = Description of Artificial Sequence: Synthetic Construct
  source 1..1950: mol_type = other DNA

SEQ ID NO: 6066 - DNA, 1797 bp, synthetic construct; identical to SEQ ID NO: 1703
  misc_feature 1..1797: note = Description of Artificial Sequence: Synthetic Construct
  source 1..1797: mol_type = other DNA

SEQ ID NO: 6067 - DNA, 2034 bp, synthetic construct; identical to SEQ ID NO: 165
  misc_feature 1..2034: note = Description of Artificial Sequence: Synthetic Construct
  source 1..2034: mol_type = other DNA

SEQ ID NO: 6068 - DNA, 2034 bp, synthetic construct; identical to SEQ ID NO: 166
  misc_feature 1..2034: note = Description of Artificial Sequence: Synthetic Construct
  source 1..2034: mol_type = other DNA

SEQ ID NO: 6069 - DNA, 2034 bp, synthetic construct; identical to SEQ ID NO: 167
  misc_feature 1..2034: note = Description of Artificial Sequence: Synthetic Construct
  source 1..2034: mol_type = other DNA

SEQ ID NO: 6070 - DNA, 2034 bp, synthetic construct; identical to SEQ ID NO: 1707
  misc_feature 1..2034: note = Description of Artificial Sequence: Synthetic Construct
  source 1..2034: mol_type = other DNA

SEQ ID NO: 6071 - DNA, 1824 bp, synthetic construct; identical to SEQ ID NO: 1708
  misc_feature 1..1824: note = Description of Artificial Sequence: Synthetic Construct
  source 1..1824: mol_type = other DNA

SEQ ID NO: 6072 - DNA, 1977 bp, synthetic construct; identical to SEQ ID NO: 1709
  misc_feature 1..1977: note = Description of Artificial Sequence: Synthetic Construct
  source 1..1977: mol_type = other DNA

SEQ ID NO: 6073 - DNA, 2061 bp, synthetic construct; identical to SEQ ID NO: 176
  misc_feature 1..2061: note = Description of Artificial Sequence: Synthetic Construct
  source 1..2061: mol_type = other DNA

SEQ ID NO: 6074 - DNA, 2061 bp, synthetic construct; identical to SEQ ID NO: 177
  misc_feature 1..2061: note = Description of Artificial Sequence: Synthetic Construct
  source 1..2061: mol_type = other DNA

SEQ ID NO: 6075 - DNA, 1959 bp, synthetic construct; identical to SEQ ID NO: 1822
  misc_feature 1..1959: note = Description of Artificial Sequence: Synthetic Construct
  source 1..1959: mol_type = other DNA

SEQ ID NO: 6076 - DNA, 1962 bp, synthetic construct; identical to SEQ ID NO: 1824
  misc_feature 1..1962: note = Description of Artificial Sequence: Synthetic Construct
  source 1..1962: mol_type = other DNA

SEQ ID NO: 6077 - DNA, 1971 bp, synthetic construct; identical to SEQ ID NO: 1826
  misc_feature 1..1971: note = Description of Artificial Sequence: Synthetic Construct
  source 1..1971: mol_type = other DNA

SEQ ID NO: 6078 - DNA, 1968 bp, synthetic construct; identical to SEQ ID NO: 1828
  misc_feature 1..1968: note = Description of Artificial Sequence: Synthetic Construct
  source 1..1968: mol_type = other DNA

SEQ ID NO: 6079 - DNA, 1956 bp, synthetic construct; identical to SEQ ID NO: 1830
  misc_feature 1..1956: note = Description of Artificial Sequence: Synthetic Construct
  source 1..1956: mol_type = other DNA

SEQ ID NO: 6080 - DNA, 1623 bp, synthetic construct; identical to SEQ ID NO: 172
  misc_feature 1..1623: note = Description of Artificial Sequence: Synthetic Construct
  source 1..1623: mol_type = other DNA

SEQ ID NO: 6081 - DNA, 2130 bp, synthetic construct; identical to SEQ ID NO: 1834
  misc_feature 1..2130: note = Description of Artificial Sequence: Synthetic Construct
  source 1..2130: mol_type = other DNA

SEQ ID NO: 6082 - DNA, 2214 bp, synthetic construct; identical to SEQ ID NO: 173
  misc_feature 1..2214: note = Description of Artificial Sequence: Synthetic Construct
  source 1..2214: mol_type = other DNA

SEQ ID NO: 6083 - DNA, 1980 bp, synthetic construct; identical to SEQ ID NO: 1838
  misc_feature 1..1980: note = Description of Artificial Sequence: Synthetic Construct
  source 1..1980: mol_type = other DNA

SEQ ID NO: 6084 - DNA, 432 bp, synthetic construct; identical to SEQ ID NO: 1861
  misc_feature 1..432: note = Description of Artificial Sequence: Synthetic polynucleotide
  source 1..432: mol_type = other DNA

SEQ ID NO: 6085 - DNA, 405 bp, synthetic construct; identical to SEQ ID NO: 1857
  misc_feature 1..405: note = Description of Artificial Sequence: Synthetic polynucleotide
  source 1..405: mol_type = other DNA

SEQ ID NO: 6086 - DNA, 912 bp, synthetic construct; identical to SEQ ID NO: 1859
  misc_feature 1..912: note = Description of Artificial Sequence: Synthetic polynucleotide
  source 1..912: mol_type = other DNA

SEQ ID NO: 6087 - DNA, 1170 bp, synthetic construct; identical to SEQ ID NO: 1863
  misc_feature 1..1170: note = Description of Artificial Sequence: Synthetic polynucleotide
  source 1..1170: mol_type = other DNA

SEQ ID NO: 6088 - DNA, 1734 bp, synthetic construct; identical to SEQ ID NO: 1865
  misc_feature 1..1734: note = Description of Artificial Sequence: Synthetic polynucleotide
  source 1..1734: mol_type = other DNA

SEQ ID NO: 6089 - DNA, 1668 bp, synthetic construct; identical to SEQ ID NO: 2107
  misc_feature 1..1668: note = Description of Artificial Sequence: Synthetic polynucleotide
  source 1..1668: mol_type = other DNA

SEQ ID NO: 6090 - DNA, 1515 bp, synthetic construct; identical to SEQ ID NO: 1952
  misc_feature 1..1515: note = Description of Artificial Sequence: Synthetic polynucleotide
  source 1..1515: mol_type = other DNA

SEQ ID NO: 6091 - DNA, 1188 bp, synthetic construct; identical to SEQ ID NO: 169
  misc_feature 1..1188: note = Description of Artificial Sequence: Synthetic polynucleotide
  source 1..1188: mol_type = other DNA

SEQ ID NO: 6092 - DNA, 1668 bp, synthetic construct; identical to SEQ ID NO: 1956
  misc_feature 1..1668: note = Description of Artificial Sequence: Synthetic polynucleotide
  source 1..1668: mol_type = other DNA

SEQ ID NO: 6093 - DNA, 1752 bp, synthetic construct; identical to SEQ ID NO: 170
  misc_feature 1..1752: note = Description of Artificial Sequence: Synthetic polynucleotide
  source 1..1752: mol_type = other DNA

SEQ ID NO: 6094 - DNA, 1752 bp, synthetic construct; identical to SEQ ID NO: 171
  misc_feature 1..1752: note = Description of Artificial Sequence: Synthetic polynucleotide
  source 1..1752: mol_type = other DNA

SEQ ID NO: 6095 - DNA, 1752 bp, synthetic construct; identical to SEQ ID NO: 1962
  misc_feature 1..1752: note = Description of Artificial Sequence: Synthetic Construct
  source 1..1752: mol_type = other DNA

SEQ ID NO: 6096 - DNA, 1752 bp, synthetic construct; identical to SEQ ID NO: 1964
  misc_feature 1..1752: note = Description of Artificial Sequence: Synthetic Construct
  source 1..1752: mol_type = other DNA

SEQ ID NO: 6097 - DNA, 1752 bp, synthetic construct; identical to SEQ ID NO: 1966
  misc_feature 1..1752: note = Description of Artificial Sequence: Synthetic Construct
  source 1..1752: mol_type = other DNA

SEQ ID NO: 6098 - DNA, 1215 bp, synthetic construct; identical to SEQ ID NO: 1968
  misc_feature 1..1215: note = Description of Artificial Sequence: Synthetic Construct
  source 1..1215: mol_type = other DNA

SEQ ID NO: 6099 - DNA, 1212 bp, synthetic construct; identical to SEQ ID NO: 1970
  misc_feature 1..1212: note = Description of Artificial Sequence: Synthetic Construct
  source 1..1212: mol_type = other DNA

SEQ ID NO: 6100 - DNA, 1212 bp, synthetic construct; identical to SEQ ID NO: 1972
  misc_feature 1..1212: note = Description of Artificial Sequence: Synthetic Construct
  source 1..1212: mol_type = other DNA

SEQ ID NO: 6101 - DNA, 1116 bp, synthetic construct; identical to SEQ ID NO: 1974
  misc_feature 1..1116: note = Description of Artificial Sequence: Synthetic Construct
  source 1..1116: mol_type = other DNA

SEQ ID NO: 6102 - DNA, 1224 bp, synthetic construct; identical to SEQ ID NO: 1976
  misc_feature 1..1224: note = Description of Artificial Sequence: Synthetic Construct
  source 1..1224: mol_type = other DNA

SEQ ID NO: 6103 - DNA, 1194 bp, synthetic construct; identical to SEQ ID NO: 1978
  misc_feature 1..1194: note = Description of Artificial Sequence: Synthetic Construct
  source 1..1194: mol_type = other DNA

SEQ ID NO: 6104 - DNA, 1668 bp, synthetic construct; identical to SEQ ID NO: 1980
  misc_feature 1..1668: note = Description of Artificial Sequence: Synthetic Construct
  source 1..1668: mol_type = other DNA

SEQ ID NO: 6105 - DNA, 1224 bp, synthetic construct; identical to SEQ ID NO: 1982
  misc_feature 1..1224: note = Description of Artificial Sequence: Synthetic Construct
  source 1..1224: mol_type = other DNA

SEQ ID NO: 6106 - DNA, 1722 bp, synthetic construct; identical to SEQ ID NO: 1985
  misc_feature 1..1722: note = Description of Artificial Sequence: Synthetic Construct
  source 1..1722: mol_type = other DNA

SEQ ID NO: 6107 - DNA, 1245 bp, synthetic construct; identical to SEQ ID NO: 1987
  misc_feature 1..1245: note = Description of Artificial Sequence: Synthetic Construct
  source 1..1245: mol_type = other DNA

SEQ ID NO: 6108 - DNA, 1806 bp, synthetic construct; identical to SEQ ID NO: 1989
  misc_feature 1..1806: note = Description of Artificial Sequence: Synthetic Construct
  source 1..1806: mol_type = other DNA

SEQ ID NO: 6109 - DNA, 1806 bp, synthetic construct; identical to SEQ ID NO: 1991
  misc_feature 1..1806: note = Description of Artificial Sequence: Synthetic Construct
  source 1..1806: mol_type = other DNA

SEQ ID NO: 6110 - DNA, 1806 bp, synthetic construct; identical to SEQ ID NO: 1993
  misc_feature 1..1806: note = Description of Artificial Sequence: Synthetic Construct
  source 1..1806: mol_type = other DNA

SEQ ID NO: 6111 - DNA, 1806 bp, synthetic construct; identical to SEQ ID NO: 1995
  misc_feature 1..1806: note = Description of Artificial Sequence: Synthetic Construct
  source 1..1806: mol_type = other DNA

SEQ ID NO: 6112 - DNA, 1806 bp, synthetic construct; identical to SEQ ID NO: 1997
  misc_feature 1..1806: note = Description of Artificial Sequence: Synthetic Construct
  source 1..1806: mol_type = other DNA

SEQ ID NO: 6113 - DNA, 1806 bp, synthetic construct; identical to SEQ ID NO: 1999
  misc_feature 1..1806: note = Description of Artificial Sequence: Synthetic Construct
  source 1..1806: mol_type = other DNA

SEQ ID NO: 6114 - DNA, 2046 bp, synthetic construct; identical to SEQ ID NO: 2001
  misc_feature 1..2046: note = Description of Artificial Sequence: Synthetic Construct
  source 1..2046: mol_type = other DNA

SEQ ID NO: 6115 - DNA, 1959 bp, synthetic construct; identical to SEQ ID NO: 2003
  misc_feature 1..1959: note = Description of Artificial Sequence: Synthetic Construct
  source 1..1959: mol_type = other DNA

SEQ ID NO: 6116 - DNA, 2291 bp, synthetic construct; identical to SEQ ID NO: 2020
  misc_feature 1..2291: note = Description of Artificial Sequence: Synthetic Construct
  source 1..2291: mol_type = other DNA

SEQ ID NO: 6117 - DNA, 1735 bp, synthetic construct; identical to SEQ ID NO: 2035
  misc_feature 1..1735: note = Description of Artificial Sequence: Synthetic Construct
  source 1..1735: mol_type = other DNA

SEQ ID NO: 6118 - DNA, 321 bp, synthetic construct; identical to SEQ ID NO: 1664
  misc_feature 1..321: note = Description of Artificial Sequence: Synthetic Destabilizing Domain (DD)
  source 1..321: mol_type = other DNA

SEQ ID NO: 6119 - DNA, 321 bp, synthetic construct; identical to SEQ ID NO: 1666
  misc_feature 1..321: note = Description of Artificial Sequence: Synthetic Destabilizing Domain (DD)
  source 1..321: mol_type = other DNA

SEQ ID NO: 6120 - DNA, 321 bp, synthetic construct; identical to SEQ ID NO: 1667
  misc_feature 1..321: note = Description of Artificial Sequence: Synthetic Destabilizing Domain (DD)
  source 1..321: mol_type = other DNA

SEQ ID NO: 6121 - DNA, 324 bp, synthetic construct; identical to SEQ ID NO: 1669
  misc_feature 1..324: note = Description of Artificial Sequence: Synthetic Destabilizing Domain (DD)
  source 1..324: mol_type = other DNA

SEQ ID NO: 6122 - DNA, 324 bp, synthetic construct; identical to SEQ ID NO: 1670
  misc_feature 1..324: note = Description of Artificial Sequence: Synthetic Destabilizing Domain (DD)
  source 1..324: mol_type = other DNA

SEQ ID NO: 6123 - DNA, 324 bp, synthetic construct; identical to SEQ ID NO: 1671
  misc_feature 1..324: note = Description of Artificial Sequence: Synthetic Destabilizing Domain (DD)
  source 1..324: mol_type = other DNA

SEQ ID NO: 6124 - DNA, 324 bp, synthetic construct; identical to SEQ ID NO: 1672
  misc_feature 1..324: note = Description of Artificial Sequence: Synthetic Destabilizing Domain (DD)
  source 1..324: mol_type = other DNA

SEQ ID NO: 6125 - DNA, 474 bp, synthetic construct; identical to SEQ ID NO: 1676
  misc_feature 1..474: note = Description of Artificial Sequence: Synthetic Destabilizing Domain (DD)
  source 1..474: mol_type = other DNA

SEQ ID NO: 6126 - DNA, 477 bp, synthetic construct; identical to SEQ ID NO: 1677
  misc_feature 1..477: note = Description of Artificial Sequence: Synthetic Destabilizing Domain (DD)
  source 1..477: mol_type = other DNA

SEQ ID NO: 6127 - DNA, 477 bp, synthetic construct; identical to SEQ ID NO: 1682
  misc_feature 1..477: note = Description of Artificial Sequence: Synthetic Destabilizing Domain (DD)
  source 1..477: mol_type = other DNA

SEQ ID NO: 6128 - DNA, 474 bp, synthetic construct; identical to SEQ ID NO: 1678
  misc_feature 1..474: note = Description of Artificial Sequence: Synthetic Destabilizing Domain (DD)
  source 1..474: mol_type = other DNA

SEQ ID NO: 6129 - DNA, 474 bp, synthetic construct; identical to SEQ ID NO: 1683
  misc_feature 1..474: note = Description of Artificial Sequence: Synthetic Destabilizing Domain (DD)
  source 1..474: mol_type = other DNA

SEQ ID NO: 6130 - DNA, 561 bp, synthetic construct; identical to SEQ ID NO: 77
  misc_feature 1..561: note = Description of Artificial Sequence: Synthetic Destabilizing Domain (DD)
  source 1..561: mol_type = other DNA

SEQ ID NO: 6131 - DNA, 561 bp, synthetic construct; identical to SEQ ID NO: 85
  misc_feature 1..561: note = Description of Artificial Sequence: Synthetic Destabilizing Domain (DD)
  source 1..561: mol_type = other DNA

SEQ ID NO: 6132 - DNA, 561 bp, synthetic construct; identical to SEQ ID NO: 73
  misc_feature 1..561: note = Description of Artificial Sequence: Synthetic Destabilizing Domain (DD)
  source 1..561: mol_type = other DNA

SEQ ID NO: 6133 - DNA, 561 bp, synthetic construct; identical to SEQ ID NO: 82
  misc_feature 1..561: note = Description of Artificial Sequence: Synthetic Destabilizing Domain (DD)
  source 1..561: mol_type = other DNA

SEQ ID NO: 6134 - DNA, 561 bp, synthetic construct; identical to SEQ ID NO: 74
  misc_feature 1..561: note = Description of Artificial Sequence: Synthetic Destabilizing Domain (DD)
  source 1..561: mol_type = other DNA

SEQ ID NO: 6135 - DNA, 561 bp, synthetic construct; identical to SEQ ID NO: 80
  misc_feature 1..561: note = Description of Artificial Sequence: Synthetic Destabilizing Domain (DD)
  source 1..561: mol_type = other DNA

SEQ ID NO: 6136 - DNA, 561 bp, synthetic construct; identical to SEQ ID NO: 78
  misc_feature 1..561: note = Description of Artificial Sequence: Synthetic Destabilizing Domain (DD)
  source 1..561: mol_type = other DNA

SEQ ID NO: 6137 - DNA, 561 bp, synthetic construct; identical to SEQ ID NO: 75
  misc_feature 1..561: note = Description of Artificial Sequence: Synthetic Destabilizing Domain (DD)
  source 1..561: mol_type = other DNA

SEQ ID NO: 6138 - DNA, 561 bp, synthetic construct; identical to SEQ ID NO: 79
  misc_feature 1..561: note = Description of Artificial Sequence: Synthetic Destabilizing Domain (DD)
  source 1..561: mol_type = other DNA

SEQ ID NO: 6139 - DNA, 561 bp, synthetic construct; identical to SEQ ID NO: 81
  misc_feature 1..561: note = Description of Artificial Sequence: Synthetic Destabilizing Domain (DD)
  source 1..561: mol_type = other DNA

SEQ ID NO: 6140 - DNA, 561 bp, synthetic construct; identical to SEQ ID NO: 76
  misc_feature 1..561: note = Description of Artificial Sequence: Synthetic Destabilizing Domain (DD)
  source 1..561: mol_type = other DNA

SEQ ID NO: 6141 - DNA, 561 bp, synthetic construct; identical to SEQ ID NO: 84
  misc_feature 1..561: note = Description of Artificial Sequence: Synthetic Destabilizing Domain (DD)
  source 1..561: mol_type = other DNA

SEQ ID NO: 6142 - DNA, 558 bp, synthetic construct; identical to SEQ ID NO: 86
  misc_feature 1..558: note = Description of Artificial Sequence: Synthetic Destabilizing Domain (DD)
  source 1..558: mol_type = other DNA

SEQ ID NO: 6143 - DNA, 558 bp, synthetic construct; identical to SEQ ID NO: 1685
  misc_feature 1..558: note = Description of Artificial Sequence: Synthetic Destabilizing Domain (DD)
  source 1..558: mol_type = other DNA

SEQ ID NO: 6144 - DNA, 561 bp, synthetic construct; identical to SEQ ID NO: 1688
  misc_feature 1..561: note = Description of Artificial Sequence: Synthetic Destabilizing Domain (DD)
  source 1..561: mol_type = other DNA

SEQ ID NO: 6145 - DNA, 558 bp, synthetic construct; identical to SEQ ID NO: 1689
  misc_feature 1..558: note = Description of Artificial Sequence: Synthetic Destabilizing Domain (DD)
  source 1..558: mol_type = other DNA

SEQ ID NO: 6146 - DNA, 561 bp, synthetic construct; identical to SEQ ID NO: 1694
  misc_feature 1..561: note = Description of Artificial Sequence: Synthetic Destabilizing Domain (DD)
  source 1..561: mol_type = other DNA

SEQ ID NO: 6147 - DNA, 558 bp, synthetic construct; identical to SEQ ID NO: 1695
  misc_feature 1..558: note = Description of Artificial Sequence: Synthetic Destabilizing Domain (DD)
  source 1..558: mol_type = other DNA

SEQ ID NO: 6148 - DNA, 558 bp, synthetic construct; identical to SEQ ID NO: 1943
  misc_feature 1..558: note = Description of Artificial Sequence: Synthetic Destabilizing Domain (DD)
  source 1..558: mol_type = other DNA

SEQ ID NO: 6149 - DNA, 561 bp, synthetic construct; identical to SEQ ID NO: 1944
  misc_feature 1..561: note = Description of Artificial Sequence: Synthetic Destabilizing Domain (DD)
  source 1..561: mol_type = other DNA

SEQ ID NO: 6150 - DNA, 561 bp, synthetic construct; identical to SEQ ID NO: 1944
  misc_feature 1..561: note = Description of Artificial Sequence: Synthetic Destabilizing Domain (DD)
  source 1..561: mol_type = other DNA

SEQ ID NO: 6151 - DNA, 561 bp, synthetic construct; identical to SEQ ID NO: 107
  misc_feature 1..561: note = Description of Artificial Sequence: Synthetic Destabilizing Domain (DD)
  source 1..561: mol_type = other DNA

SEQ ID NO: 6152 - DNA, 558 bp, synthetic construct; identical to SEQ ID NO: 1946
  misc_feature 1..558: note = Description of Artificial Sequence: Synthetic Destabilizing Domain (DD)
  source 1..558: mol_type = other DNA

SEQ ID NO: 6153 - DNA, 558 bp, synthetic construct; identical to SEQ ID NO: 1820
  misc_feature 1..558: note = Description of Artificial Sequence: Synthetic Destabilizing Domain (DD)
  source 1..558: mol_type = other DNA

SEQ ID NO: 6154 - DNA, 558 bp, synthetic construct; identical to SEQ ID NO: 126
  misc_feature 1..558: note = Description of Artificial Sequence: Synthetic Destabilizing Domain (DD)
  source 1..558: mol_type = other DNA

SEQ ID NO: 6155 - DNA, 558 bp, synthetic construct; identical to SEQ ID NO: 1948
  misc_feature 1..558: note = Description of Artificial Sequence: Synthetic Destabilizing Domain (DD)
  source 1..558: mol_type = other DNA

SEQ ID NO: 6156 - DNA, 405 bp, synthetic construct; identical to SEQ ID NO: 1857
  misc_feature 1..405: note = Description of Artificial Sequence: Synthetic polynucleotide
  source 1..405: mol_type = other DNA

SEQ ID NO: 6157 - DNA, 912 bp, synthetic construct; identical to SEQ ID NO: 1859
  misc_feature 1..912: note = Description of Artificial Sequence: Synthetic polynucleotide
  source 1..912: mol_type = other DNA

SEQ ID NO: 6158 - DNA, 1170 bp, synthetic construct; identical to SEQ ID NO: 1863
  misc_feature 1..1170: note = Description of Artificial Sequence: Synthetic polynucleotide
  source 1..1170: mol_type = other DNA

SEQ ID NO: 6159 - protein, 577 aa, synthetic construct; identical to SEQ ID NO: 1864
  REGION 1..577: note = Description of Artificial Sequence: Synthetic polypeptide

SEQ ID NO: 6160 - DNA, 1734 bp, synthetic construct; identical to SEQ ID NO: 1865
  misc_feature 1..1734: note = Description of Artificial Sequence: Synthetic polynucleotide
  source 1..1734: mol_type = other DNA

SEQ ID NO: 6161 - DNA, 1668 bp, synthetic construct; identical to SEQ ID NO: 2107
  misc_feature 1..1668: note = Description of Artificial Sequence: Synthetic polynucleotide
  source 1..1668: mol_type = other DNA

SEQ ID NO: 6162 - DNA, 1515 bp, synthetic construct; identical to SEQ ID NO: 1952
  misc_feature 1..1515: note = Description of Artificial Sequence: Synthetic polynucleotide
  source 1..1515: mol_type = other DNA

SEQ ID NO: 6163 - DNA, 1188 bp, synthetic construct; identical to SEQ ID NO: 169
  misc_feature 1..1188: note = Description of Artificial Sequence: Synthetic polynucleotide
  source 1..1188: mol_type = other DNA

SEQ ID NO: 6164 - DNA, 1668 bp, synthetic construct; identical to SEQ ID NO: 1956
  misc_feature 1..1668: note = Description of Artificial Sequence: Synthetic polynucleotide
  source 1..1668: mol_type = other DNA

SEQ ID NO: 6165 - DNA, 1752 bp, synthetic construct; identical to SEQ ID NO: 170
  misc_feature 1..1752: note = Description of Artificial Sequence: Synthetic polynucleotide
  source 1..1752: mol_type = other DNA

SEQ ID NO: 6166 - DNA, 1752 bp, synthetic construct; identical to SEQ ID NO: 171
  misc_feature 1..1752: note = Description of Artificial Sequence: Synthetic polynucleotide
  source 1..1752: mol_type = other DNA

SEQ ID NO: 6167 - DNA, 432 bp, synthetic construct; identical to SEQ ID NO: 1861
  misc_feature 1..432: note = Description of Artificial Sequence: Synthetic polynucleotide
  source 1..432: mol_type = other DNA

SEQ ID NO: 6168 - DNA, 561 bp, synthetic construct; identical to SEQ ID NO: 1944
  misc_feature 1..561: note = Description of Artificial Sequence: Synthetic Destabilizing Domain (DD)
  source 1..561: mol_type = other DNA

SEQ ID NO: 6169 - DNA, 1752 bp, synthetic construct; identical to SEQ ID NO: 1962
  misc_feature 1..1752: note = Description of Artificial Sequence: Synthetic construct
  source 1..1752: mol_type = other DNA

SEQ ID NO: 6170 - DNA, 1752 bp, synthetic construct; identical to SEQ ID NO: 1966
  misc_feature 1..1752: note = Description of Artificial Sequence: Synthetic construct
  source 1..1752: mol_type = other DNA

SEQ ID NO: 6171 - DNA, 1215 bp, synthetic construct; identical to SEQ ID NO: 1968
  misc_feature 1..1215: note = Description of Artificial Sequence: Synthetic construct
  source 1..1215: mol_type = other DNA

SEQ ID NO: 6172 - DNA, 1212 bp, synthetic construct; identical to SEQ ID NO: 1970
  misc_feature 1..1212: note = Description of Artificial Sequence: Synthetic construct
  source 1..1212: mol_type = other DNA

SEQ ID NO: 6173 - DNA, 1212 bp, synthetic construct; identical to SEQ ID NO: 1972
  misc_feature 1..1212: note = Description of Artificial Sequence: Synthetic construct
  source 1..1212: mol_type = other DNA

SEQ ID NO: 6174 - DNA, 1116 bp, synthetic construct; identical to SEQ ID NO: 1974
  misc_feature 1..1116: note = Description of Artificial Sequence: Synthetic construct
  source 1..1116: mol_type = other DNA

SEQ ID NO: 6175 - DNA, 1224 bp, synthetic construct; identical to SEQ ID NO: 1976
  misc_feature 1..1224: note = Description of Artificial Sequence: Synthetic construct
  source 1..1224: mol_type = other DNA

SEQ ID NO: 6176 - DNA, 1194 bp, synthetic construct; identical to SEQ ID NO: 1978
  misc_feature 1..1194: note = Description of Artificial Sequence: Synthetic construct
  source 1..1194: mol_type = other DNA

SEQ ID NO: 6177 - DNA, 1668 bp, synthetic construct; identical to SEQ ID NO: 1980
  misc_feature 1..1668: note = Description of Artificial Sequence: Synthetic construct
  source 1..1668: mol_type = other DNA

SEQ ID NO: 6178 - DNA, 1224 bp, synthetic construct; identical to SEQ ID NO: 1976
  misc_feature 1..1224: note = Description of Artificial Sequence: Synthetic construct
  source 1..1224: mol_type = other DNA

SEQ ID NO: 6179 - DNA, 1116 bp, synthetic construct; identical to SEQ ID NO: 2141
  misc_feature 1..1116: note = Description of Artificial Sequence: Synthetic construct
  source 1..1116: mol_type = other DNA

SEQ ID NO: 6180 - DNA, 1224 bp, synthetic construct; identical to SEQ ID NO: 1982
  misc_feature 1..1224: note = Description of Artificial Sequence: Synthetic construct
  source 1..1224: mol_type = other DNA

SEQ ID NO: 6181 - DNA, 1188 bp, synthetic construct; identical to SEQ ID NO: 5582
  misc_feature 1..1188: note = Description of Artificial Sequence: Synthetic construct
  source 1..1188: mol_type = other DNA

SEQ ID NO: 6182 - DNA, 1722 bp, synthetic construct; identical to SEQ ID NO: 1985
  misc_feature 1..1722: note = Description of Artificial Sequence: Synthetic construct
  source 1..1722: mol_type = other DNA

SEQ ID NO: 6183 - DNA, 1245 bp, synthetic construct; identical to SEQ ID NO: 1987
  misc_feature 1..1245: note = Description of Artificial Sequence: Synthetic construct
  source 1..1245: mol_type = other DNA

SEQ ID NO: 6184 - DNA, 1806 bp, synthetic construct; identical to SEQ ID NO: 1989
  misc_feature 1..1806: note = Description of Artificial Sequence: Synthetic construct
  source 1..1806: mol_type = other DNA

SEQ ID NO: 6185 - DNA, 1806 bp, synthetic construct; identical to SEQ ID NO: 1991
  misc_feature 1..1806: note = Description of Artificial Sequence: Synthetic construct
  source 1..1806: mol_type = other DNA

SEQ ID NO: 6186 - DNA, 1806 bp, synthetic construct; identical to SEQ ID NO: 1993
  misc_feature 1..1806: note = Description of Artificial Sequence: Synthetic construct
  source 1..1806: mol_type = other DNA

SEQ ID NO: 6187 - DNA, 1806 bp, synthetic construct; identical to SEQ ID NO: 1995
  misc_feature 1..1806: note = Description of Artificial Sequence: Synthetic construct
  source 1..1806: mol_type = other DNA

SEQ ID NO: 6188 - DNA, 321 bp, synthetic construct; identical to SEQ ID NO: 1664
  misc_feature 1..321: note = Description of Artificial Sequence: Synthetic Destabilized Domain (DD)
  source 1..321: mol_type = other DNA

SEQ ID NO: 6189 - DNA, 321 bp, synthetic construct; identical to SEQ ID NO: 1665
  misc_feature 1..321: note = Description of Artificial Sequence: Synthetic Destabilized Domain (DD)
  source 1..321: mol_type = other DNA

SEQ ID NO: 6190 - DNA, 321 bp, synthetic construct; identical to SEQ ID NO: 1666
  misc_feature 1..321: note = Description of Artificial Sequence: Synthetic Destabilized Domain (DD)
  source 1..321: mol_type = other DNA

SEQ ID NO: 6191 - DNA, 324 bp, synthetic construct; identical to SEQ ID NO: 1669
  misc_feature 1..324: note = Description of Artificial Sequence: Synthetic Destabilizing Domain (DD)
  source 1..324: mol_type = other DNA

SEQ ID NO: 6192 - DNA, 324 bp, synthetic construct; identical to SEQ ID NO: 1670
  misc_feature 1..324: note = Description of Artificial Sequence: Synthetic Destabilizing Domain (DD)
  source 1..324: mol_type = other DNA

SEQ ID NO: 6193 - DNA, 324 bp, synthetic construct; identical to SEQ ID NO: 1671
  misc_feature 1..324: note = Description of Artificial Sequence: Synthetic Destabilizing Domain (DD)
  source 1..324: mol_type = other DNA

SEQ ID NO: 6194 - DNA, 558 bp, synthetic construct; identical to SEQ ID NO: 86
  misc_feature 1..558: note = Description of Artificial Sequence: Synthetic Destabilizing Domain (DD)
  source 1..558: mol_type = other DNA

SEQ ID NO: 6195 - DNA, 561 bp, synthetic construct; identical to SEQ ID NO: 73
  misc_feature 1..561: note = Description of Artificial Sequence: Synthetic Destabilizing Domain (DD)
  source 1..561: mol_type = other DNA

SEQ ID NO: 6196 - DNA, 561 bp, synthetic construct; identical to SEQ ID NO: 82
  misc_feature 1..561: note = Description of Artificial Sequence: Synthetic Destabilizing Domain (DD)
  source 1..561: mol_type = other DNA

SEQ ID NO: 6197 - DNA, 561 bp, synthetic construct; identical to SEQ ID NO: 74
  misc_feature 1..561: note = Description of Artificial Sequence: Synthetic Destabilizing Domain (DD)
  source 1..561: mol_type = other DNA

SEQ ID NO: 6198 - DNA, 561 bp, synthetic construct; identical to SEQ ID NO: 80
  misc_feature 1..561: note = Description of Artificial Sequence: Synthetic Destabilizing Domain (DD)
  source 1..561: mol_type = other DNA

SEQ ID NO: 6199 - DNA, 561 bp, synthetic construct; identical to SEQ ID NO: 78
  misc_feature 1..561: note = Description of Artificial Sequence: Synthetic Destabilizing Domain (DD)
  source 1..561: mol_type = other DNA

SEQ ID NO: 6200 - DNA, 561 bp, synthetic construct; identical to SEQ ID NO: 75
  misc_feature 1..561: note = Description of Artificial Sequence: Synthetic Destabilizing Domain (DD)
  source 1..561: mol_type = other DNA

SEQ ID NO: 6201 - DNA, 561 bp, synthetic construct; identical to SEQ ID NO: 79
  misc_feature 1..561: note = Description of Artificial Sequence: Synthetic Destabilizing Domain (DD)
  source 1..561: mol_type = other DNA

SEQ ID NO: 6202 - DNA, 561 bp, synthetic construct; identical to SEQ ID NO: 81
  misc_feature 1..561: note = Description of Artificial Sequence: Synthetic Destabilizing Domain (DD)
  source 1..561: mol_type = other DNA

SEQ ID NO: 6203 - DNA, 561 bp, synthetic construct; identical to SEQ ID NO: 76
  misc_feature 1..561: note = Description of Artificial Sequence: Synthetic Destabilizing Domain (DD)
  source 1..561: mol_type = other DNA

SEQ ID NO: 6204 - DNA, 561 bp, synthetic construct; identical to SEQ ID NO: 84
  misc_feature 1..561: note = Description of Artificial Sequence: Synthetic Destabilizing Domain (DD)
  source 1..561: mol_type = other DNA

SEQ ID NO: 6205 - DNA, 561 bp, synthetic construct; identical to SEQ ID NO: 91
  misc_feature 1..561: note = Description of Artificial Sequence: Synthetic Destabilizing Domain (DD)
  source 1..561: mol_type = other DNA

SEQ ID NO: 6206 - DNA, 561 bp, synthetic construct; identical to SEQ ID NO: 92
  misc_feature 1..561: note = Description of Artificial Sequence: Synthetic Destabilizing Domain (DD)
  source 1..561: mol_type = other DNA

SEQ ID NO: 6207 - DNA, 561 bp, synthetic construct; identical to SEQ ID NO: 93
  misc_feature 1..561: note = Description of Artificial Sequence: Synthetic Destabilizing Domain (DD)
  source 1..561: mol_type = other DNA

SEQ ID NO: 6208 - DNA, 561 bp, synthetic construct; identical to SEQ ID NO: 94
  misc_feature 1..561: note = Description of Artificial Sequence: Synthetic Destabilizing Domain (DD)
  source 1..561: mol_type = other DNA

SEQ ID NO: 6209 - DNA, 561 bp, synthetic construct; identical to SEQ ID NO: 95
  misc_feature 1..561: note = Description of Artificial Sequence: Synthetic Destabilizing Domain (DD)
  source 1..561: mol_type = other DNA

SEQ ID NO: 6210 - DNA, 561 bp, synthetic construct; identical to SEQ ID NO: 96
  misc_feature 1..561: note = Description of Artificial Sequence: Synthetic Destabilizing Domain (DD)
  source 1..561: mol_type = other DNA

SEQ ID NO: 6211 - DNA, 561 bp, synthetic construct; identical to SEQ ID NO: 97
  misc_feature 1..561: note = Description of Artificial Sequence: Synthetic Destabilizing Domain (DD)
  source 1..561: mol_type = other DNA

SEQ ID NO: 6212 - DNA, 561 bp, synthetic construct; identical to SEQ ID NO: 98
  misc_feature 1..561: note = Description of Artificial Sequence: Synthetic Destabilizing Domain (DD)
  source 1..561: mol_type = other DNA

SEQ ID NO: 6213 - DNA, 561 bp, synthetic construct; identical to SEQ ID NO: 99
  misc_feature 1..561: note = Description of Artificial Sequence: Synthetic Destabilizing Domain (DD)
  source 1..561: mol_type = other DNA

SEQ ID NO: 6214 - DNA, 561 bp, synthetic construct; identical to SEQ ID NO: 100
  misc_feature 1..561: note = Description of Artificial Sequence: Synthetic Destabilizing Domain (DD)
  source 1..561: mol_type = other DNA

SEQ ID NO: 6215 - DNA, 561 bp, synthetic construct; identical to SEQ ID NO: 101
  misc_feature 1..561: note = Description of Artificial Sequence: Synthetic Destabilizing Domain (DD)
  source 1..561: mol_type = other DNA

SEQ ID NO: 6216 - DNA, 561 bp, synthetic construct; identical to SEQ ID NO: 102
  misc_feature 1..561: note = Description of Artificial Sequence: Synthetic Destabilizing Domain (DD)
  source 1..561: mol_type = other DNA

SEQ ID NO: 6217 - DNA, 561 bp, synthetic construct; identical to SEQ ID NO: 103
  misc_feature 1..561: note = Description of Artificial Sequence: Synthetic Destabilizing Domain (DD)
  source 1..561: mol_type = other DNA

SEQ ID NO: 6218 - DNA, 561 bp, synthetic construct; identical to SEQ ID NO: 104
  misc_feature 1..561: note = Description of Artificial Sequence: Synthetic Destabilizing Domain (DD)
  source 1..561: mol_type = other DNA

SEQ ID NO: 6219 - DNA, 561 bp, synthetic construct; identical to SEQ ID NO: 105
  misc_feature 1..561: note = Description of Artificial Sequence: Synthetic Destabilizing Domain (DD)
  source 1..561: mol_type = other DNA

SEQ ID NO: 6220 - DNA, 561 bp, synthetic construct; identical to SEQ ID NO: 106
  misc_feature 1..561: note = Description of Artificial Sequence: Synthetic Destabilizing Domain (DD)
  source 1..561: mol_type = other DNA

SEQ ID NO: 6221 - DNA, 561 bp, synthetic construct; identical to SEQ ID NO: 107
  misc_feature 1..561: note = Description of Artificial Sequence: Synthetic Destabilizing Domain (DD)
  source 1..561: mol_type = other DNA

SEQ ID NO: 6222 - DNA, 561 bp, synthetic construct; identical to SEQ ID NO: 108
  misc_feature 1..561: note = Description of Artificial Sequence: Synthetic Destabilizing Domain (DD)
  source 1..561: mol_type = other DNA

SEQ ID NO: 6223 - DNA, 561 bp, synthetic construct; identical to SEQ ID NO: 109
  misc_feature 1..561: note = Description of Artificial Sequence: Synthetic Destabilizing Domain (DD)
  source 1..561: mol_type = other DNA

SEQ ID NO: 6224 - DNA, 561 bp, synthetic construct; identical to SEQ ID NO: 110
  misc_feature 1..561: note = Description of Artificial Sequence: Synthetic Destabilizing Domain (DD)
  source 1..561: mol_type = other DNA

SEQ ID NO: 6225 - DNA, 561 bp, synthetic construct; identical to SEQ ID NO: 111
  misc_feature 1..561: note = Description of Artificial Sequence: Synthetic Destabilizing Domain (DD)
  source 1..561: mol_type = other DNA

SEQ ID NO: 6226 - DNA, 561 bp, synthetic construct; identical to SEQ ID NO: 112
  misc_feature 1..561: note = Description of Artificial Sequence: Synthetic Destabilizing Domain (DD)
  source 1..561: mol_type = other DNA

SEQ ID NO: 6227 - DNA, 561 bp, synthetic construct; identical to SEQ ID NO: 113
  misc_feature 1..561: note = Description of Artificial Sequence: Synthetic Destabilizing Domain (DD)
  source 1..561: mol_type = other DNA

SEQ ID NO: 6228 - DNA, 561 bp, synthetic construct; identical to SEQ ID NO: 114
  misc_feature 1..561: note = Description of Artificial Sequence: Synthetic Destabilizing Domain (DD)
  source 1..561: mol_type = other DNA

SEQ ID NO: 6229 - DNA, 561 bp, synthetic construct; identical to SEQ ID NO: 115
  misc_feature 1..561: note = Description of Artificial Sequence: Synthetic Destabilizing Domain (DD)
  source 1..561: mol_type = other DNA

SEQ ID NO: 6230 - DNA, 561 bp, synthetic construct; identical to SEQ ID NO: 116
  misc_feature 1..561: note = Description of Artificial Sequence: Synthetic Destabilizing Domain (DD)
  source 1..561: mol_type = other DNA

SEQ ID NO: 6231 - DNA, 561 bp, synthetic construct; identical to SEQ ID NO: 117
  misc_feature 1..561: note = Description of Artificial Sequence: Synthetic Destabilizing Domain (DD)
  source 1..561: mol_type = other DNA

SEQ ID NO: 6232 - DNA, 561 bp, synthetic construct; identical to SEQ ID NO: 118
  misc_feature 1..561: note = Description of Artificial Sequence: Synthetic Destabilizing Domain (DD)
  source 1..561: mol_type = other DNA

SEQ ID NO: 6233 - DNA, 561 bp, synthetic construct; identical to SEQ ID NO: 119
  misc_feature 1..561: note = Description of Artificial Sequence: Synthetic Destabilizing Domain (DD)
  source 1..561: mol_type = other DNA

SEQ ID NO: 6234 - DNA, 561 bp, synthetic construct; identical to SEQ ID NO: 120
  misc_feature 1..561: note = Description of Artificial Sequence: Synthetic Destabilizing Domain (DD)
  source 1..561: mol_type = other DNA

SEQ ID NO: 6235 - DNA, 561 bp, synthetic construct; identical to SEQ ID NO: 121
  misc_feature 1..561: note = Description of Artificial Sequence: Synthetic Destabilizing Domain (DD)
  source 1..561: mol_type = other DNA

SEQ ID NO: 6236 - DNA, 561 bp, synthetic construct; identical to SEQ ID NO: 122
  misc_feature 1..561: note = Description of Artificial Sequence: Synthetic Destabilizing Domain (DD)
  source 1..561: mol_type = other DNA

SEQ ID NO: 6237 - DNA, 561 bp, synthetic construct; identical to SEQ ID NO: 123
  misc_feature 1..561: note = Description of Artificial Sequence: Synthetic Destabilizing Domain (DD)
  source 1..561: mol_type = other DNA

SEQ ID NO: 6238 - DNA, 561 bp, synthetic construct; identical to SEQ ID NO: 124
  misc_feature 1..561: note = Description of Artificial Sequence: Synthetic Destabilizing Domain (DD)
  source 1..561: mol_type = other DNA

SEQ ID NO: 6239 - DNA, 558 bp, synthetic construct; identical to SEQ ID NO: 125
  misc_feature 1..558: note = Description of Artificial Sequence: Synthetic Destabilizing Domain (DD)
  source 1..558: mol_type = other DNA

SEQ ID NO: 6240 - DNA, 558 bp, synthetic construct; identical to SEQ ID NO: 1685
  misc_feature 1..558: note = Description of Artificial Sequence: Synthetic Destabilizing Domain (DD)
  source 1..558: mol_type = other DNA

SEQ ID NO: 6241 - DNA, 1959 bp, synthetic construct; identical to SEQ ID NO: 1822
  misc_feature 1..1959: note = Description of Artificial Sequence: Synthetic Construct
  source 1..1959: mol_type = other DNA

SEQ ID NO: 6242 - DNA, 1962 bp, synthetic construct; identical to SEQ ID NO: 1824
  misc_feature 1..1962: note = Description of Artificial Sequence: Synthetic Construct
  source 1..1962: mol_type = other DNA

SEQ ID NO: 6243 - DNA, 1971 bp, synthetic construct; identical to SEQ ID NO: 1826
  misc_feature 1..1971: note = Description of Artificial Sequence: Synthetic Construct
  source 1..1971: mol_type = other DNA

SEQ ID NO: 6244 - DNA, 1968 bp, synthetic construct; identical to SEQ ID NO: 1828
  misc_feature 1..1968: note = Description of Artificial Sequence: Synthetic Construct
  source 1..1968: mol_type = other DNA

SEQ ID NO: 6245 - DNA, 1956 bp, synthetic construct; identical to SEQ ID NO: 1830
  misc_feature 1..1956: note = Description of Artificial Sequence: Synthetic Construct
  source 1..1956: mol_type = other DNA

SEQ ID NO: 6246 - DNA, 1623 bp, synthetic construct; identical to SEQ ID NO: 172
  misc_feature 1..1623: note = Description of Artificial Sequence: Synthetic Construct
  source 1..1623: mol_type = other DNA

SEQ ID NO: 6247 - DNA, 2130 bp, synthetic construct; identical to SEQ ID NO: 1834
  misc_feature 1..2130: note = Description of Artificial Sequence: Synthetic Construct
  source 1..2130: mol_type = other DNA

SEQ ID NO: 6248 - DNA, 2214 bp, synthetic construct; identical to SEQ ID NO: 173
  misc_feature 1..2214: note = Description of Artificial Sequence: Synthetic Construct
  source 1..2214: mol_type = other DNA

SEQ ID NO: 6249 - DNA, 1980 bp, synthetic construct; identical to SEQ ID NO: 1838
  misc_feature 1..1980: note = Description of Artificial Sequence: Synthetic Construct
  source 1..1980: mol_type = other DNA

SEQ ID NO: 6250 - DNA, 405 bp, synthetic construct; identical to SEQ ID NO: 1857
  misc_feature 1..405: note = Description of Artificial Sequence: Synthetic polynucleotide
  source 1..405: mol_type = other DNA

SEQ ID NO: 6251 - DNA, 912 bp, synthetic construct; identical to SEQ ID NO: 1859
  misc_feature 1..912: note = Description of Artificial Sequence: Synthetic polynucleotide
  source 1..912: mol_type = other DNA

SEQ ID NO: 6252 - DNA, 432 bp, synthetic construct; identical to SEQ ID NO: 1861
  misc_feature 1..432: note = Description of Artificial Sequence: Synthetic polynucleotide
  source 1..432: mol_type = other DNA

SEQ ID NO: 6253 - DNA, 1170 bp, synthetic construct; identical to SEQ ID NO: 1863
  misc_feature 1..1170: note = Description of Artificial Sequence: Synthetic polynucleotide
  source 1..1170: mol_type = other DNA

SEQ ID NO: 6254 - DNA, 1734 bp, synthetic construct; identical to SEQ ID NO: 1865
  misc_feature 1..1734: note = Description of Artificial Sequence: Synthetic polynucleotide
  source 1..1734: mol_type = other DNA

SEQ ID NO: 6255 - DNA, 321 bp, synthetic construct; identical to SEQ ID NO: 1786
  misc_feature 1..321: note = Description of Artificial Sequence: Synthetic Destabilized Domain (DD)
  source 1..321: mol_type = other DNA

SEQ ID NO: 6256 - DNA, 321 bp, synthetic construct; identical to SEQ ID NO: 2283
  misc_feature 1..321: note = Description of Artificial Sequence: Synthetic Destabilizing Domain (DD)
  source 1..321: mol_type = other DNA

SEQ ID NO: 6257 - DNA, 321 bp, synthetic construct; identical to SEQ ID NO: 1764
  misc_feature 1..321: note = Description of Artificial Sequence: Synthetic Destabilizing Domain (DD)
  source 1..321: mol_type = other DNA

SEQ ID NO: 6258 - DNA, 321 bp, synthetic construct; identical to SEQ ID NO: 1664
  misc_feature 1..321: note = Description of Artificial Sequence: Synthetic Destabilizing Domain (DD)
  source 1..321: mol_type = other DNA

SEQ ID NO: 6259 - DNA, 321 bp, synthetic construct; identical to SEQ ID NO: 1665
  misc_feature 1..321: note = Description of Artificial Sequence: Synthetic Destabilizing Domain (DD)
  source 1..321: mol_type = other DNA

SEQ ID NO: 6260 - DNA, 321 bp, synthetic construct; identical to SEQ ID NO: 1666
  misc_feature 1..321: note = Description of Artificial Sequence: Synthetic Destabilizing Domain (DD)
  source 1..321: mol_type = other DNA

SEQ ID NO: 6261 - DNA, 321 bp, synthetic construct; identical to SEQ ID NO: 1667
  misc_feature 1..321: note = Description of Artificial Sequence: Synthetic Destabilizing Domain (DD)
  source 1..321: mol_type = other DNA

SEQ ID NO: 6262 - DNA, 321 bp, synthetic construct; identical to SEQ ID NO: 1668
  misc_feature 1..321: note = Description of Artificial Sequence: Synthetic Destabilizing Domain (DD)
  source 1..321: mol_type = other DNA

SEQ ID NO: 6263 - DNA, 324 bp, synthetic construct; identical to SEQ ID NO: 1669
  misc_feature 1..324: note = Description of Artificial Sequence: Synthetic Destabilizing Domain (DD)
  source 1..324: mol_type = other DNA

SEQ ID NO: 6264 - DNA, 324 bp, synthetic construct; identical to SEQ ID NO: 1670
  misc_feature 1..324: note = Description of Artificial Sequence: Synthetic Destabilizing Domain (DD)
  source 1..324: mol_type = other DNA

SEQ ID NO: 6265 - DNA, 324 bp, synthetic construct; identical to SEQ ID NO: 1671
  misc_feature 1..324: note = Description of Artificial Sequence: Synthetic Destabilizing Domain (DD)
  source 1..324: mol_type = other DNA

SEQ ID NO: 6266 - DNA, 324 bp, synthetic construct; identical to SEQ ID NO: 1672
  misc_feature 1..324: note = Description of Artificial Sequence: Synthetic Destabilizing Domain (DD)
  source 1..324: mol_type = other DNA

SEQ ID NO: 6267 - DNA, 321 bp, synthetic construct; identical to SEQ ID NO: 1673
  misc_feature 1..321: note = Description of Artificial Sequence: Synthetic Destabilizing Domain (DD)
  source 1..321: mol_type = other DNA

SEQ ID NO: 6268 - DNA, 321 bp, synthetic construct; identical to SEQ ID NO: 1674
  misc_feature 1..321: note = Description of Artificial Sequence: Synthetic Destabilizing Domain (DD)
  source 1..321: mol_type = other DNA

SEQ ID NO: 6269 - DNA, 321 bp, synthetic construct; identical to SEQ ID NO: 1675
  misc_feature 1..321: note = Description of Artificial Sequence: Synthetic Destabilizing Domain (DD)
  source 1..321: mol_type = other DNA

SEQ ID NO: 6270 - DNA, 474 bp, synthetic construct; identical to SEQ ID NO: 1678
  misc_feature 1..474: note = Description of Artificial Sequence: Synthetic Destabilized Domain (DD)
  source 1..474: mol_type = other DNA

SEQ ID NO: 6271 - DNA, 477 bp, synthetic construct; identical to SEQ ID NO: 5683
  misc_feature 1..477: note = Description of Artificial Sequence: Synthetic Destabilizing Domain (DD)
  source 1..477: mol_type = other DNA

SEQ ID NO: 6272 - DNA, 236 bp, synthetic construct; identical to SEQ ID NO: 2287
  misc_feature 1..236: note = Description of Artificial Sequence: Synthetic Destabilizing Domain (DD)
  source 1..236: mol_type = other DNA

SEQ ID NO: 6273 - DNA, 474 bp, synthetic construct; identical to SEQ ID NO: 1676
  misc_feature 1..474: note = Description of Artificial Sequence: Synthetic Destabilizing Domain (DD)
  source 1..474: mol_type = other DNA

SEQ ID NO: 6274 - DNA, 477 bp, synthetic construct; identical to SEQ ID NO: 1677
  misc_feature 1..477: note = Description of Artificial Sequence: Synthetic Destabilizing Domain (DD)
  source 1..477: mol_type = other DNA

SEQ ID NO: 6275 - DNA, 474 bp, synthetic construct; identical to SEQ ID NO: 1678
  misc_feature 1..474: note = Description of Artificial Sequence: Synthetic Destabilizing Domain (DD)
  source 1..474: mol_type = other DNA

SEQ ID NO: 6276 - DNA, 474 bp, synthetic construct; identical to SEQ ID NO: 1679
  misc_feature 1..474: note = Description of Artificial Sequence: Synthetic Destabilizing Domain (DD)
  source 1..474: mol_type = other DNA

SEQ ID NO: 6277 - DNA, 474 bp, synthetic construct; identical to SEQ ID NO: 1680
  misc_feature 1..474: note = Description of Artificial Sequence: Synthetic Destabilizing Domain (DD)
  source 1..474: mol_type = other DNA

SEQ ID NO: 6278 - DNA, 474 bp, synthetic construct; identical to SEQ ID NO: 1681
  misc_feature 1..474: note = Description of Artificial Sequence: Synthetic Destabilizing Domain (DD)
  source 1..474: mol_type = other DNA

SEQ ID NO: 6279 - DNA, 477 bp, synthetic construct; identical to SEQ ID NO: 1682
  misc_feature 1..477: note = Description of Artificial Sequence: Synthetic Destabilizing Domain (DD)
  source 1..477: mol_type = other DNA

SEQ ID NO: 6280 - DNA, 474 bp, synthetic construct; identical to SEQ ID NO: 1683
  misc_feature 1..474: note = Description of Artificial Sequence: Synthetic Destabilizing Domain (DD)
  source 1..474: mol_type = other DNA

SEQ ID NO: 6281 - DNA, 474 bp, synthetic construct; identical to SEQ ID NO: 1684
  misc_feature 1..474: note = Description of Artificial Sequence: Synthetic Destabilizing Domain (DD)
  source 1..474: mol_type = other DNA

SEQ ID NO: 6282 - DNA, 561 bp, synthetic construct; identical to SEQ ID NO: 73
  misc_feature 1..561: note = Description of Artificial Sequence: Synthetic Destabilizing Domain (DD)
  source 1..561: mol_type = other DNA

SEQ ID NO: 6283 - DNA, 561 bp, synthetic construct; identical to SEQ ID NO: 75
  misc_feature 1..561: note = Description of Artificial Sequence: Synthetic Destabilizing Domain (DD)
  source 1..561: mol_type = other DNA

SEQ ID NO: 6284 - DNA, 561 bp, synthetic construct; identical to SEQ ID NO: 79
  misc_feature 1..561: note = Description of Artificial Sequence: Synthetic Destabilizing Domain (DD)
  source 1..561: mol_type = other DNA

SEQ ID NO: 6285 - DNA, 561 bp, synthetic construct; identical to SEQ ID NO: 82
  misc_feature 1..561: note = Description of Artificial Sequence: Synthetic Destabilizing Domain (DD)
  source 1..561: mol_type = other DNA

SEQ ID NO: 6286 - DNA, 561 bp, synthetic construct; identical to SEQ ID NO: 83
  misc_feature 1..561: note = Description of Artificial Sequence: Synthetic Destabilizing Domain (DD)
  source 1..561: mol_type = other DNA

SEQ ID NO: 6287 - DNA, 561 bp, synthetic construct; identical to SEQ ID NO: 76
  misc_feature 1..561: note = Description of Artificial Sequence: Synthetic Destabilizing Domain (DD)
  source 1..561: mol_type = other DNA

SEQ ID NO: 6288 - DNA, 561 bp, synthetic construct; identical to SEQ ID NO: 77
  misc_feature 1..561: note = Description of Artificial Sequence: Synthetic Destabilizing Domain (DD)
  source 1..561: mol_type = other DNA

SEQ ID NO: 6289 - DNA, 561 bp, synthetic construct; identical to SEQ ID NO: 84
  misc_feature 1..561: note = Description of Artificial Sequence: Synthetic Destabilizing Domain (DD)
  source 1..561: mol_type = other DNA

SEQ ID NO: 6290 - DNA, 561 bp, synthetic construct; identical to SEQ ID NO: 85
  misc_feature 1..561: note = Description of Artificial Sequence: Synthetic Destabilizing Domain (DD)
  source 1..561: mol_type = other DNA

SEQ ID NO: 6291 - DNA, 558 bp, synthetic construct; identical to SEQ ID NO: 86
  misc_feature 1..558: note = Description of Artificial Sequence: Synthetic Destabilized Domain (DD)
  source 1..558: mol_type = other DNA

SEQ ID NO: 6292 - DNA, 561 bp, synthetic construct; identical to SEQ ID NO: 74
  misc_feature 1..561: note = Description of Artificial Sequence: Synthetic Destabilizing Domain (DD)
  source 1..561: mol_type = other DNA

SEQ ID NO: 6293 - DNA, 561 bp, synthetic construct; identical to SEQ ID NO: 80
  misc_feature 1..561: note = Description of Artificial Sequence: Synthetic Destabilizing Domain (DD)
  source 1..561: mol_type = other DNA

SEQ ID NO: 6294 - DNA, 561 bp, synthetic construct; identical to SEQ ID NO: 78
  misc_feature 1..561: note = Description of Artificial Sequence: Synthetic Destabilizing Domain (DD)
  source 1..561: mol_type = other DNA

SEQ ID NO: 6295 - DNA, 561 bp, synthetic construct; identical to SEQ ID NO: 81
  misc_feature 1..561: note = Description of Artificial Sequence: Synthetic Destabilizing Domain (DD)
  source 1..561: mol_type = other DNA

SEQ ID NO: 6296 - DNA, 561 bp, synthetic construct; identical to SEQ ID NO: 90
  misc_feature 1..561: note = Description of Artificial Sequence: Synthetic Destabilizing Domain (DD)
  source 1..561: mol_type = other DNA

SEQ ID NO: 6297 - DNA, 561 bp, synthetic construct; identical to SEQ ID NO: 91
  misc_feature 1..561: note = Description of Artificial Sequence: Synthetic Destabilizing Domain (DD)
  source 1..561: mol_type = other DNA

SEQ ID NO: 6298 - DNA, 561 bp, synthetic construct; identical to SEQ ID NO: 92
  misc_feature 1..561: note = Description of Artificial Sequence: Synthetic Destabilizing Domain (DD)
  source 1..561: mol_type = other DNA

SEQ ID NO: 6299 - DNA, 561 bp, synthetic construct; identical to SEQ ID NO: 93
  misc_feature 1..561: note = Description of Artificial Sequence: Synthetic Destabilizing Domain (DD)
  source 1..561: mol_type = other DNA

SEQ ID NO: 6300 - DNA, 561 bp, synthetic construct; identical to SEQ ID NO: 94
  misc_feature 1..561: note = Description of Artificial Sequence: Synthetic Destabilizing Domain (DD)
  source 1..561: mol_type = other DNA

SEQ ID NO: 6301 - DNA, 561 bp, synthetic construct; identical to SEQ ID NO: 95
  misc_feature 1..561: note = Description of Artificial Sequence: Synthetic Destabilizing Domain (DD)
  source 1..561: mol_type = other DNA

SEQ ID NO: 6302 - DNA, 561 bp, synthetic construct; identical to SEQ ID NO: 96
  misc_feature 1..561: note = Description of Artificial Sequence: Synthetic Destabilizing Domain (DD)
  source 1..561: mol_type = other DNA

SEQ ID NO: 6303 - DNA, 561 bp, synthetic construct; identical to SEQ ID NO: 97
  misc_feature 1..561: note = Description of Artificial Sequence: Synthetic Destabilizing Domain (DD)
  source 1..561: mol_type = other DNA

SEQ ID NO: 6304 - DNA, 561 bp, synthetic construct; identical to SEQ ID NO: 98
  misc_feature 1..561: note = Description of Artificial Sequence: Synthetic Destabilizing Domain (DD)
  source 1..561: mol_type = other DNA

SEQ ID NO: 6305 - DNA, 561 bp, synthetic construct; identical to SEQ ID NO: 99
  misc_feature 1..561: note = Description of Artificial Sequence: Synthetic Destabilizing Domain (DD)
  source 1..561: mol_type = other DNA

SEQ ID NO: 6306 - DNA, 561 bp, synthetic construct; identical to SEQ ID NO: 100
  misc_feature 1..561: note = Description of Artificial Sequence: Synthetic Destabilizing Domain (DD)
  source 1..561: mol_type = other DNA

SEQ ID NO: 6307 - DNA, 561 bp, synthetic construct; identical to SEQ ID NO: 101
  misc_feature 1..561: note = Description of Artificial Sequence: Synthetic Destabilizing Domain (DD)
  source 1..561: mol_type = other DNA

SEQ ID NO: 6308 - DNA, 561 bp, synthetic construct; identical to SEQ ID NO: 102
  misc_feature 1..561: note = Description of Artificial Sequence: Synthetic Destabilizing Domain (DD)
  source 1..561: mol_type = other DNA

SEQ ID NO: 6309 - DNA, 561 bp, synthetic construct; identical to SEQ ID NO: 103
  misc_feature 1..561: note = Description of Artificial Sequence: Synthetic Destabilizing Domain (DD)
  source 1..561: mol_type = other DNA

SEQ ID NO: 6310 - DNA, 561 bp, synthetic construct; identical to SEQ ID NO: 104
  misc_feature 1..561: note = Description of Artificial Sequence: Synthetic Destabilizing Domain (DD)
  source 1..561: mol_type = other DNA

SEQ ID NO: 6311 - DNA, 561 bp, synthetic construct; identical to SEQ ID NO: 105
  misc_feature 1..561: note = Description of Artificial Sequence: Synthetic Destabilizing Domain (DD)
  source 1..561: mol_type = other DNA

SEQ ID NO: 6312 - DNA, 561 bp, synthetic construct; identical to SEQ ID NO: 106
  misc_feature 1..561: note = Description of Artificial Sequence: Synthetic Destabilizing Domain (DD)
  source 1..561: mol_type = other DNA

SEQ ID NO: 6313 - DNA, 561 bp, synthetic construct; identical to SEQ ID NO: 107
  misc_feature 1..561: note = Description of Artificial Sequence: Synthetic Destabilizing Domain (DD)
  source 1..561: mol_type = other DNA

SEQ ID NO: 6314 - DNA, 561 bp, synthetic construct; identical to SEQ ID NO: 108
  misc_feature 1..561: note = Description of Artificial Sequence: Synthetic Destabilizing Domain (DD)
  source 1..561: mol_type = other DNA

SEQ ID NO: 6315 - DNA, 561 bp, synthetic construct; identical to SEQ ID NO: 109
  misc_feature 1..561: note = Description of Artificial Sequence: Synthetic Destabilizing Domain (DD)
  source 1..561: mol_type = other DNA

SEQ ID NO: 6316 - DNA, 561 bp, synthetic construct; identical to SEQ ID NO: 110
  misc_feature 1..561: note = Description of Artificial Sequence: Synthetic Destabilizing Domain (DD)
  source 1..561: mol_type = other DNA

SEQ ID NO: 6317 - DNA, 561 bp, synthetic construct; identical to SEQ ID NO: 111
  misc_feature 1..561: note = Description of Artificial Sequence: Synthetic Destabilizing Domain (DD)
  source 1..561: mol_type = other DNA

SEQ ID NO: 6318 - DNA, 561 bp, synthetic construct; identical to SEQ ID NO: 112
  misc_feature 1..561: note = Description of Artificial Sequence: Synthetic Destabilizing Domain (DD)
  source 1..561: mol_type = other DNA

SEQ ID NO: 6319 - DNA, 561 bp, synthetic construct; identical to SEQ ID NO: 113
  misc_feature 1..561: note = Description of Artificial Sequence: Synthetic Destabilizing Domain (DD)
  source 1..561: mol_type = other DNA

SEQ ID NO: 6320 - DNA, 561 bp, synthetic construct; identical to SEQ ID NO: 114
  misc_feature 1..561: note = Description of Artificial Sequence: Synthetic Destabilizing Domain (DD)
  source 1..561: mol_type = other DNA

SEQ ID NO: 6321 - DNA, 561 bp, synthetic construct; identical to SEQ ID NO: 115
  misc_feature 1..561: note = Description of Artificial Sequence: Synthetic Destabilizing Domain (DD)
  source 1..561: mol_type = other DNA

SEQ ID NO: 6322 - DNA, 561 bp, synthetic construct; identical to SEQ ID NO: 116
  misc_feature 1..561: note = Description of Artificial Sequence: Synthetic Destabilizing Domain (DD)
  source 1..561: mol_type = other DNA

SEQ ID NO: 6323 - DNA, 561 bp, synthetic construct; identical to SEQ ID NO: 117
  misc_feature 1..561: note = Description of Artificial Sequence: Synthetic Destabilizing Domain (DD)
  source 1..561: mol_type = other DNA

SEQ ID NO: 6324 - DNA, 561 bp, synthetic construct; identical to SEQ ID NO: 118
  misc_feature 1..561: note = Description of Artificial Sequence: Synthetic Destabilizing Domain (DD)
  source 1..561: mol_type = other DNA

SEQ ID NO: 6325 - DNA, 561 bp, synthetic construct; identical to SEQ ID NO: 119
  misc_feature 1..561: note = Description of Artificial Sequence: Synthetic Destabilizing Domain (DD)
  source 1..561: mol_type = other DNA

SEQ ID NO: 6326 - DNA, 561 bp, synthetic construct; identical to SEQ ID NO: 120
  misc_feature 1..561: note = Description of Artificial Sequence: Synthetic Destabilizing Domain (DD)
  source 1..561: mol_type = other DNA

SEQ ID NO: 6327 - DNA, 561 bp, synthetic construct; identical to SEQ ID NO: 121
  misc_feature 1..561: note = Description of Artificial Sequence: Synthetic Destabilizing Domain (DD)
  source 1..561: mol_type = other DNA

SEQ ID NO: 6328 - DNA, 561 bp, synthetic construct; identical to SEQ ID NO: 122
  misc_feature 1..561: note = Description of Artificial Sequence: Synthetic Destabilizing Domain (DD)
  source 1..561: mol_type = other DNA

SEQ ID NO: 6329 - DNA, 561 bp, synthetic construct; identical to SEQ ID NO: 123
  misc_feature 1..561: note = Description of Artificial Sequence: Synthetic Destabilizing Domain (DD)
  source 1..561: mol_type = other DNA

SEQ ID NO: 6330 - DNA, 561 bp, synthetic construct; identical to SEQ ID NO: 124
  misc_feature 1..561: note = Description of Artificial Sequence: Synthetic Destabilizing Domain (DD)
  source 1..561: mol_type = other DNA

SEQ ID NO: 6331 - DNA, 558 bp, synthetic construct; identical to SEQ ID NO: 125
  misc_feature 1..558: note = Description of Artificial Sequence: Synthetic Destabilizing Domain (DD)
  source 1..558: mol_type = other DNA

SEQ ID NO: 6332 - DNA, 558 bp, synthetic construct; identical to SEQ ID NO: 126
  misc_feature 1..558: note = Description of Artificial Sequence: Synthetic Destabilizing Domain (DD)
  source 1..558: mol_type = other DNA

SEQ ID NO: 6333 - DNA, 561 bp, synthetic construct; identical to SEQ ID NO: 1944
  misc_feature 1..561: note = Description of Artificial Sequence: Synthetic Destabilizing Domain (DD)
  source 1..561: mol_type = other DNA

SEQ ID NO: 6334 - DNA, 561 bp, synthetic construct; identical to SEQ ID NO: 1944
  misc_feature 1..561: note = Description of Artificial Sequence: Synthetic Destabilizing Domain (DD)
  source 1..561: mol_type = other DNA

SEQ ID NO: 6335 - DNA, 558 bp, synthetic construct; identical to SEQ ID NO: 1943
  misc_feature 1..558: note = Description of Artificial Sequence: Synthetic Destabilizing Domain (DD)
  source 1..558: mol_type = other DNA

SEQ ID NO: 6336 - DNA, 561 bp, synthetic construct; identical to SEQ ID NO: 1688
  misc_feature 1..561: note = Description of Artificial Sequence: Synthetic Destabilizing Domain (DD)
  source 1..561: mol_type = other DNA

SEQ ID NO: 6337 - DNA, 558 bp, synthetic construct; identical to SEQ ID NO: 1689
  misc_feature 1..558: note = Description of Artificial Sequence: Synthetic Destabilizing Domain (DD)
  source 1..558: mol_type = other DNA

SEQ ID NO: 6338 - DNA, 558 bp, synthetic construct; identical to SEQ ID NO: 1690
  misc_feature 1..558: note = Description of Artificial Sequence: Synthetic Destabilizing Domain (DD)
  source 1..558: mol_type = other DNA

SEQ ID NO: 6339 - DNA, 561 bp, synthetic construct; identical to SEQ ID NO: 1694
  misc_feature 1..561: note = Description of Artificial Sequence: Synthetic Destabilizing Domain (DD)
  source 1..561: mol_type = other DNA

SEQ ID NO: 6340 - DNA, 558 bp, synthetic construct; identical to SEQ ID NO: 1695
  misc_feature 1..558: note = Description of Artificial Sequence: Synthetic Destabilizing Domain (DD)
  source 1..558: mol_type = other DNA

SEQ ID NO: 6341 - DNA, 558 bp, synthetic construct; identical to SEQ ID NO: 1696
  misc_feature 1..558: note = Description of Artificial Sequence: Synthetic Destabilizing Domain (DD)
  source 1..558: mol_type = other DNA

SEQ ID NO: 6342 - DNA, 558 bp, synthetic construct; identical to SEQ ID NO: 1946
  misc_feature 1..558: note = Description of Artificial Sequence: Synthetic Destabilizing Domain (DD)
  source 1..558: mol_type = other DNA

SEQ ID NO: 6343 - DNA, 558 bp, synthetic construct; identical to SEQ ID NO: 1948
  misc_feature 1..558: note = Description of Artificial Sequence: Synthetic Destabilizing Domain (DD)
  source 1..558: mol_type = other DNA

SEQ ID NO: 6344 - DNA, 558 bp, synthetic construct; identical to SEQ ID NO: 1820
  misc_feature 1..558: note = Description of Artificial Sequence: Synthetic Destabilizing Domain (DD)
  source 1..558: mol_type = other DNA

SEQ ID NO: 6345 - DNA, 558 bp, synthetic construct; identical to SEQ ID NO: 1685
  misc_feature 1..558: note = Description of Artificial Sequence: Synthetic Destabilizing Domain (DD)
  source 1..558: mol_type = other DNA

SEQ ID NO: 6346 - DNA, 558 bp, synthetic construct; identical to SEQ ID NO: 1686
  misc_feature 1..558: note = Description of Artificial Sequence: Synthetic Destabilizing Domain (DD)
  source 1..558: mol_type = other DNA

SEQ ID NO: 6347 - DNA, 558 bp, synthetic construct; identical to SEQ ID NO: 1692
  misc_feature 1..558: note = Description of Artificial Sequence: Synthetic Destabilizing Domain (DD)
  source 1..558: mol_type = other DNA

SEQ ID NO: 6348 - DNA, 807 bp, synthetic construct; identical to SEQ ID NO: 1792
  misc_feature 1..807: note = Description of Artificial Sequence: Synthetic Construct
  source 1..807: mol_type = other DNA

SEQ ID NO: 6349 - DNA, 462 bp, synthetic construct; identical to SEQ ID NO: 1793
  misc_feature 1..462: note = Description of Artificial Sequence: Synthetic Construct
  source 1..462: mol_type = other DNA

SEQ ID NO: 6350 - DNA, 960 bp, synthetic construct; identical to SEQ ID NO: 1794
  misc_feature 1..960: note = Description of Artificial Sequence: Synthetic Construct
  source 1..960: mol_type = other DNA

SEQ ID NO: 6351 - DNA, 1587 bp, synthetic construct; identical to SEQ ID NO: 2294
  misc_feature 1..1587: note = Description of Artificial Sequence: Synthetic Payload
  source 1..1587: mol_type = other DNA

SEQ ID NO: 6352 - DNA, 1740 bp, synthetic construct; identical to SEQ ID NO: 2295
  misc_feature 1..1740: note = Description of Artificial Sequence: Synthetic Payload
  source 1..1740: mol_type = other DNA

SEQ ID NO: 6353 - DNA, 1824 bp, synthetic construct; identical to SEQ ID NO: 178
  misc_feature 1..1824: note = Description of Artificial Sequence: Synthetic Payload
  source 1..1824: mol_type = other DNA

SEQ ID NO: 6354 - DNA, 1824 bp, synthetic construct; identical to SEQ ID NO: 179
  misc_feature 1..1824: note = Description of Artificial Sequence: Synthetic Payload
  source 1..1824: mol_type = other DNA

SEQ ID NO: 6355 - DNA, 1824 bp, synthetic construct; identical to SEQ ID NO: 180
  misc_feature 1..1824: note = Description of Artificial Sequence: Synthetic Payload
  source 1..1824: mol_type = other DNA

SEQ ID NO: 6356 - DNA, 1242 bp, synthetic construct; identical to SEQ ID NO: 2299
  misc_feature 1..1242: note = Description of Artificial Sequence: Synthetic Payload
  source 1..1242: mol_type = other DNA

SEQ ID NO: 6357 - DNA, 1578 bp, synthetic construct; identical to SEQ ID NO: 2300
  misc_feature 1..1578: note = Description of Artificial Sequence: Synthetic Payload
  source 1..1578: mol_type = other DNA

SEQ ID NO: 6358 - DNA, 1731 bp, synthetic construct; identical to SEQ ID NO: 2301
  misc_feature 1..1731: note = Description of Artificial Sequence: Synthetic Payload
  source 1..1731: mol_type = other DNA

SEQ ID NO: 6359 - DNA, 1731 bp, synthetic construct; identical to SEQ ID NO: 2302
  misc_feature 1..1731: note = Description of Artificial Sequence: Synthetic Payload
  source 1..1731: mol_type = other DNA

SEQ ID NO: 6360 - DNA, 1296 bp, synthetic construct; identical to SEQ ID NO: 2307
  misc_feature 1..1296: note = Description of Artificial Sequence: Synthetic Construct
  source 1..1296: mol_type = other DNA

SEQ ID NO: 6361 - DNA, 1191 bp, synthetic construct; identical to SEQ ID NO: 2308
  misc_feature 1..1191: note = Description of Artificial Sequence: Synthetic Construct
  source 1..1191: mol_type = other DNA

SEQ ID NO: 6362 - DNA, 1632 bp, synthetic construct; identical to SEQ ID NO: 2309
  misc_feature 1..1632: note = Description of Artificial Sequence: Synthetic Construct
  source 1..1632: mol_type = other DNA

SEQ ID NO: 6363 - DNA, 1785 bp, synthetic construct; identical to SEQ ID NO: 2310
  misc_feature 1..1785: note = Description of Artificial Sequence: Synthetic Construct
  source 1..1785: mol_type = other DNA

SEQ ID NO: 6364 - DNA, 1623 bp, synthetic construct; identical to SEQ ID NO: 2311
  misc_feature 1..1623: note = Description of Artificial Sequence: Synthetic Construct
  source 1..1623: mol_type = other DNA

SEQ ID NO: 6365 - DNA, 1776 bp, synthetic construct; identical to SEQ ID NO: 2312
  misc_feature 1..1776: note = Description of Artificial Sequence: Synthetic Construct
  source 1..1776: mol_type = other DNA

SEQ ID NO: 6366 - DNA, 1518 bp, synthetic construct; identical to SEQ ID NO: 2313
  misc_feature 1..1518: note = Description of Artificial Sequence: Synthetic Construct
  source 1..1518: mol_type = other DNA

SEQ ID NO: 6367 - DNA, 1671 bp, synthetic construct; identical to SEQ ID NO: 2314
  misc_feature 1..1671: note = Description of Artificial Sequence: Synthetic Construct
  source 1..1671: mol_type = other DNA

SEQ ID NO: 6368 - DNA, 1518 bp, synthetic construct; identical to SEQ ID NO: 2315
  misc_feature 1..1518: note = Description of Artificial Sequence: Synthetic Construct
  source 1..1518: mol_type = other DNA

SEQ ID NO: 6369 - DNA, 1671 bp, synthetic construct; identical to SEQ ID NO: 2316
  misc_feature 1..1671: note = Description of Artificial Sequence: Synthetic Construct
  source 1..1671: mol_type = other DNA

SEQ ID NO: 6370 - DNA, 1473 bp, synthetic construct; identical to SEQ ID NO: 1772
  misc_feature 1..1473: note = Description of Artificial Sequence: Synthetic Construct
  source 1..1473: mol_type = other DNA

SEQ ID NO: 6371 - DNA, 1800 bp, synthetic construct; identical to SEQ ID NO: 1773
  misc_feature 1..1800: note = Description of Artificial Sequence: Synthetic Construct
  source 1..1800: mol_type = other DNA

SEQ ID NO: 6372 - DNA, 1953 bp, synthetic construct; identical to SEQ ID NO: 1774
  misc_feature 1..1953: note = Description of Artificial Sequence: Synthetic Construct
  source 1..1953: mol_type = other DNA

SEQ ID NO: 6373 - protein, 311 aa, Renilla reniformis; identical to SEQ ID NO: 2698

SEQ ID NO: 6374 - DNA, 936 bp, Renilla reniformis; identical to SEQ ID NO: 2685
  source 1..936: mol_type = other DNA

SEQ ID NO: 6375 - protein, 550 aa, Photinus pyralis; identical to SEQ ID NO: 2700

SEQ ID NO: 6376 - DNA, 1653 bp, Photinus pyralis; identical to SEQ ID NO: 2701
  source 1..1653: mol_type = other DNA

SEQ ID NO: 6377 - DNA, 936 bp, Renilla reniformis; identical to SEQ ID NO: 2685
  source 1..936: mol_type = other DNA

SEQ ID NO: 6378 - DNA, 1653 bp, Photinus pyralis; identical to SEQ ID NO: 2701
  source 1..1653: mol_type = other DNA

SEQ ID NO: 6379 - DNA, 321 bp, synthetic construct; identical to SEQ ID NO: 1786
  misc_feature 1..321: note = Description of Artificial Sequence: Synthetic Destabilized Domain (DD)
  source 1..321: mol_type = other DNA

SEQ ID NO: 6380 - DNA, 321 bp, synthetic construct; identical to SEQ ID NO: 1664
  misc_feature 1..321: note = Description of Artificial Sequence: Synthetic Destabilizing Domain (DD)
  source 1..321: mol_type = other DNA

SEQ ID NO: 6381 - DNA, 321 bp, synthetic construct; identical to SEQ ID NO: 1665
  misc_feature 1..321: note = Description of Artificial Sequence: Synthetic Destabilizing Domain (DD)
  source 1..321: mol_type = other DNA

SEQ ID NO: 6382 - DNA, 321 bp, synthetic construct; identical to SEQ ID NO: 1666
  misc_feature 1..321: note = Description of Artificial Sequence: Synthetic Destabilizing Domain (DD)
  source 1..321: mol_type = other DNA

SEQ ID NO: 6383 - DNA, 321 bp, synthetic construct; identical to SEQ ID NO: 1667
  misc_feature 1..321: note = Description of Artificial Sequence: Synthetic Destabilizing Domain (DD)
  source 1..321: mol_type = other DNA

SEQ ID NO: 6384 - DNA, 321 bp, synthetic construct; identical to SEQ ID NO: 1668
  misc_feature 1..321: note = Description of Artificial Sequence: Synthetic Destabilizing Domain (DD)
  source 1..321: mol_type = other DNA

SEQ ID NO: 6385 - DNA, 321 bp, synthetic construct; identical to SEQ ID NO: 1764
  misc_feature 1..321: note = Description of Artificial Sequence: Synthetic Destabilizing Domain (DD)
  source 1..321: mol_type = other DNA

SEQ ID NO: 6386 - DNA, 324 bp, synthetic construct; identical to SEQ ID NO: 1669
  misc_feature 1..324: note = Description of Artificial Sequence: Synthetic Destabilizing Domain (DD)
  source 1..324: mol_type = other DNA

SEQ ID NO: 6387 - DNA, 324 bp, synthetic construct; identical to SEQ ID NO: 1670
  misc_feature 1..324: note = Description of Artificial Sequence: Synthetic Destabilizing Domain (DD)
  source 1..324: mol_type = other DNA

SEQ ID NO: 6388 - DNA, 324 bp, synthetic construct; identical to SEQ ID NO: 1671
  misc_feature 1..324: note = Description of Artificial Sequence: Synthetic Destabilizing Domain (DD)
  source 1..324: mol_type = other DNA

SEQ ID NO: 6389 - DNA, 324 bp, synthetic construct; identical to SEQ ID NO: 1672
  misc_feature 1..324: note = Description of Artificial Sequence: Synthetic Destabilizing Domain (DD)
  source 1..324: mol_type = other DNA

SEQ ID NO: 6390 - DNA, 321 bp, synthetic construct; identical to SEQ ID NO: 1673
  misc_feature 1..321: note = Description of Artificial Sequence: Synthetic Destabilizing Domain (DD)
  source 1..321: mol_type = other DNA

SEQ ID NO: 6391 - DNA, 321 bp, synthetic construct; identical to SEQ ID NO: 1674
  misc_feature 1..321: note = Description of Artificial Sequence: Synthetic Destabilizing Domain (DD)
  source 1..321: mol_type = other DNA

SEQ ID NO: 6392 - DNA, 321 bp, synthetic construct; identical to SEQ ID NO: 1675
  misc_feature 1..321: note = Description of Artificial Sequence: Synthetic Destabilizing Domain (DD)
  source 1..321: mol_type = other DNA

SEQ ID NO: 6393 - DNA, 477 bp, synthetic construct; identical to SEQ ID NO: 5683
  misc_feature 1..477: note = Description of Artificial Sequence: Synthetic Destabilizing Domain (DD)
  source 1..477: mol_type = other DNA

SEQ ID NO: 6394 - DNA, 936 bp, synthetic construct; identical to SEQ ID NO: 2685
  misc_feature 1..936: note = Description of Artificial Sequence: Synthetic Construct
  source 1..936: mol_type = other DNA

SEQ ID NO: 6395 - DNA, 1983 bp, synthetic construct; identical to SEQ ID NO: 2686
  misc_feature 1..1983: note = Description of Artificial Sequence: Synthetic Construct
  source 1..1983: mol_type = other DNA

SEQ ID NO: 6396 - DNA, 1263 bp, synthetic construct; identical to SEQ ID NO: 2687
  misc_feature 1..1263: note = Description of Artificial Sequence: Synthetic Construct
  source 1..1263: mol_type = other DNA

SEQ ID NO: 6397 - DNA, 1416 bp, synthetic construct; identical to SEQ ID NO: 2688
  misc_feature 1..1416: note = Description of Artificial Sequence: Synthetic Construct
  source 1..1416: mol_type = other DNA

SEQ ID NO: 6398 - DNA, 1263 bp, synthetic construct; identical to SEQ ID NO: 2689
  misc_feature 1..1263: note = Description of Artificial Sequence: Synthetic Construct
  source 1..1263: mol_type = other DNA

SEQ ID NO: 6399 - DNA, 1416 bp, synthetic construct; identical to SEQ ID NO: 2727
  misc_feature 1..1416: note = Description of Artificial Sequence: Synthetic Construct
  source 1..1416: mol_type = other DNA

SEQ ID NO: 6400 - DNA, 603 bp, synthetic construct; identical to SEQ ID NO: 1795
  misc_feature 1..603: note = Description of Artificial Sequence: Synthetic Promoter
  source 1..603: mol_type = other DNA

SEQ ID NO: 6401 - DNA, 1339 bp, synthetic construct; identical to SEQ ID NO: 1796
  misc_feature 1..1339: note = Description of Artificial Sequence: Synthetic Promoter
  source 1..1339: mol_type = other DNA

SEQ ID NO: 6402 - DNA, 399 bp, synthetic construct; identical to SEQ ID NO: 1797
  misc_feature 1..399: note = Description of Artificial Sequence: Synthetic Promoter
  source 1..399: mol_type = other DNA

SEQ ID NO: 6403 - DNA, 603 bp, synthetic construct; identical to SEQ ID NO: 1795
  misc_feature 1..603: note = Description of Artificial Sequence: Synthetic promoter
  source 1..603: mol_type = other DNA

SEQ ID NO: 6404 - DNA, 1339 bp, synthetic construct; identical to SEQ ID NO: 1796
  misc_feature 1..1339: note = Description of Artificial Sequence: Synthetic promoter
  source 1..1339: mol_type = other DNA

SEQ ID NO: 6405 - DNA, 399 bp, synthetic construct; identical to SEQ ID NO: 1797
  misc_feature 1..399: note = Description of Artificial Sequence: Synthetic promoter
  source 1..399: mol_type = other DNA

SEQ ID NO: 6406 - DNA, 1335 bp, synthetic construct; identical to SEQ ID NO: 1798
  misc_feature 1..1335: note = Description of Artificial Sequence: Synthetic promoter
  source 1..1335: mol_type = other DNA

SEQ ID NO: 6407 - DNA, 603 bp, synthetic construct; identical to SEQ ID NO: 1795
  misc_feature 1..603: note = Description of Artificial Sequence: Synthetic Promoter
  source 1..603: mol_type = other DNA

SEQ ID NO: 6408 - DNA, 1339 bp, synthetic construct; identical to SEQ ID NO: 1796
  misc_feature 1..1339: note = Description of Artificial Sequence: Synthetic Promoter
  source 1..1339: mol_type = other DNA

SEQ ID NO: 6409 - DNA, 399 bp, synthetic construct; identical to SEQ ID NO: 1797
  misc_feature 1..399: note = Description of Artificial Sequence: Synthetic Promoter
  source 1..399: mol_type = other DNA

SEQ ID NO: 6410 - DNA, 1335 bp, synthetic construct; identical to SEQ ID NO: 1798
  misc_feature 1..1335: note = Description of Artificial Sequence: Synthetic Promoter
  source 1..1335: mol_type = other DNA

SEQ ID NO: 6411 - DNA, 21 bp, synthetic construct
  misc_feature 1..21: note = Description of Artificial Sequence: Synthetic Forward Primer
  source 1..21: mol_type = other DNA
gaattcctcgaggccaccatg

SEQ ID NO: 6412 - DNA, 20 bp, synthetic construct
  misc_feature 1..20: note = Description of Artificial Sequence: Synthetic Reverse Primer
  source 1..20: mol_type = other DNA
ccaccagagccaccactagt

SEQ ID NO: 6413 - protein, 6 aa, synthetic construct
  REGION 1..6: note = Description of Artificial Sequence: Synthetic Linker
GGSGGG

SEQ ID NO: 6414 - protein, 239 aa, synthetic construct; identical to SEQ ID NO: 1181
  REGION 1..239: note = Description of Artificial Sequence: Synthetic polypeptide

SEQ ID NO: 6415 - protein, 187 aa, synthetic construct; identical to SEQ ID NO: 2
  REGION 1..187: note = Description of Artificial Sequence: Synthetic Destabilizing Domain (DD)

SEQ ID NO: 6416 - protein, 187 aa, synthetic construct; identical to SEQ ID NO: 3
  REGION 1..187: note = Description of Artificial Sequence: Synthetic Destabilizing Domain (DD)

SEQ ID NO: 6417 - protein, 187 aa, synthetic construct; identical to SEQ ID NO: 4
  REGION 1..187: note = Description of Artificial Sequence: Synthetic Destabilizing Domain (DD)

SEQ ID NO: 6418 - protein, 187 aa, synthetic construct; identical to SEQ ID NO: 5
  REGION 1..187: note = Description of Artificial Sequence: Synthetic Destabilizing Domain (DD)

SEQ ID NO: 6419 - protein, 187 aa, synthetic construct; identical to SEQ ID NO: 6
  REGION 1..187: note = Description of Artificial Sequence: Synthetic Destabilizing Domain (DD)

SEQ ID NO: 6420 - protein, 187 aa, synthetic construct; identical to SEQ ID NO: 7
  REGION 1..187: note = Description of Artificial Sequence: Synthetic Destabilizing Domain (DD)

SEQ ID NO: 6421 - protein, 187 aa, synthetic construct; identical to SEQ ID NO: 8
  REGION 1..187: note = Description of Artificial Sequence: Synthetic Destabilizing Domain (DD)

SEQ ID NO: 6422 - protein, 187 aa, synthetic construct; identical to SEQ ID NO: 9
  REGION 1..187: note = Description of Artificial Sequence: Synthetic Destabilizing Domain (DD)

SEQ ID NO: 6423 - protein, 187 aa, synthetic construct; identical to SEQ ID NO: 10
  REGION 1..187: note = Description of Artificial Sequence: Synthetic Destabilizing Domain (DD)

SEQ ID NO: 6424 - protein, 187 aa, synthetic construct; identical to SEQ ID NO: 11
  REGION 1..187: note = Description of Artificial Sequence: Synthetic Destabilizing Domain (DD)

SEQ ID NO: 6425 - protein, 187 aa, synthetic construct; identical to SEQ ID NO: 12
  REGION 1..187: note = Description of Artificial Sequence: Synthetic Destabilizing Domain (DD)

SEQ ID NO: 6426 - protein, 186 aa, synthetic construct; identical to SEQ ID NO: 13
  REGION 1..186: note = Description of Artificial Sequence: Synthetic Destabilizing Domain (DD)

SEQ ID NO: 6427 - protein, 187 aa, synthetic construct; identical to SEQ ID NO: 14
  REGION 1..187: note = Description of Artificial Sequence: Synthetic Destabilizing Domain (DD)

SEQ ID NO: 6428 - protein, 187 aa, synthetic construct; identical to SEQ ID NO: 15
  REGION 1..187: note = Description of Artificial Sequence: Synthetic Destabilizing Domain (DD)

SEQ ID NO: 6429 - protein, 187 aa, synthetic construct; identical to SEQ ID NO: 16
  REGION 1..187: note = Description of Artificial Sequence: Synthetic Destabilizing Domain (DD)

SEQ ID NO: 6430 - protein, 187 aa, synthetic construct; identical to SEQ ID NO: 17
  REGION 1..187: note = Description of Artificial Sequence: Synthetic Destabilizing Domain (DD)

SEQ ID NO: 6431 - protein, 187 aa, synthetic construct; identical to SEQ ID NO: 18
  REGION 1..187: note = Description of Artificial Sequence: Synthetic Destabilizing Domain (DD)

SEQ ID NO: 6432 - protein, 187 aa, synthetic construct; identical to SEQ ID NO: 19
  REGION 1..187: note = Description of Artificial Sequence: Synthetic Destabilizing Domain (DD)

SEQ ID NO: 6433 - protein, 187 aa, synthetic construct; identical to SEQ ID NO: 20
  REGION 1..187: note = Description of Artificial Sequence: Synthetic Destabilizing Domain (DD)

SEQ ID NO: 6434 - protein, 187 aa, synthetic construct; identical to SEQ ID NO: 21
  REGION 1..187: note = Description of Artificial Sequence: Synthetic Destabilizing Domain (DD)

SEQ ID NO: 6435 - protein, 187 aa, synthetic construct; identical to SEQ ID NO: 22
  REGION 1..187: note = Description of Artificial Sequence: Synthetic Destabilizing Domain (DD)

SEQ ID NO: 6436 - protein, 187 aa, synthetic construct; identical to SEQ ID NO: 23
  REGION 1..187: note = Description of Artificial Sequence: Synthetic Destabilizing Domain (DD)

SEQ ID NO: 6437 - protein, 187 aa, synthetic construct; identical to SEQ ID NO: 24
  REGION 1..187: note = Description of Artificial Sequence: Synthetic Destabilizing Domain (DD)

SEQ ID NO: 6438 - protein, 187 aa, synthetic construct; identical to SEQ ID NO: 25
  REGION 1..187: note = Description of Artificial Sequence: Synthetic Destabilizing Domain (DD)

SEQ ID NO: 6439 - protein, 187 aa, synthetic construct; identical to SEQ ID NO: 26
  REGION 1..187: note = Description of Artificial Sequence: Synthetic Destabilizing Domain (DD)

SEQ ID NO: 6440 - protein, 187 aa, synthetic construct; identical to SEQ ID NO: 27
  REGION 1..187: note = Description of Artificial Sequence: Synthetic Destabilizing Domain (DD)

SEQ ID NO: 6441 - protein, 187 aa, synthetic construct; identical to SEQ ID NO: 28
  REGION 1..187: note = Description of Artificial Sequence: Synthetic Destabilizing Domain (DD)

SEQ ID NO: 6442 - protein, 187 aa, synthetic construct; identical to SEQ ID NO: 29
  REGION 1..187: note = Description of Artificial Sequence: Synthetic Destabilizing Domain (DD)

SEQ ID NO: 6443 - protein, 187 aa, synthetic construct; identical to SEQ ID NO: 30
  REGION 1..187: note = Description of Artificial Sequence: Synthetic Destabilizing Domain (DD)

SEQ ID NO: 6444 - protein, 187 aa, synthetic construct; identical to SEQ ID NO: 31
  REGION 1..187: note = Description of Artificial Sequence: Synthetic Destabilizing Domain (DD)

SEQ ID NO: 6445 - protein, 186 aa, synthetic construct; identical to SEQ ID NO: 32
  REGION 1..186: note = Description of Artificial Sequence: Synthetic Destabilizing Domain (DD)

SEQ ID NO: 6446 - protein, 186 aa, synthetic construct; identical to SEQ ID NO: 33
  REGION 1..186: note = Description of Artificial Sequence: Synthetic Destabilizing Domain (DD)

SEQ ID NO: 6447 - protein, 186 aa, synthetic construct; identical to SEQ ID NO: 34
  REGION 1..186: note = Description of Artificial Sequence: Synthetic Destabilizing Domain (DD)

SEQ ID NO: 6448 - protein, 186 aa, synthetic construct; identical to SEQ ID NO: 35
  REGION 1..186: note = Description of Artificial Sequence: Synthetic Destabilizing Domain (DD)

SEQ ID NO: 6449 - protein, 186 aa, synthetic construct; identical to SEQ ID NO: 36
  REGION 1..186: note = Description of Artificial Sequence: Synthetic Destabilizing Domain (DD)

SEQ ID NO: 6450 - protein, 186 aa, synthetic construct; identical to SEQ ID NO: 37
  REGION 1..186: note = Description of Artificial Sequence: Synthetic Destabilizing Domain (DD)

SEQ ID NO: 6451 - protein, 186 aa, synthetic construct; identical to SEQ ID NO: 38
  REGION 1..186: note = Description of Artificial Sequence: Synthetic Destabilizing Domain (DD)

SEQ ID NO: 6452 - protein, 186 aa, synthetic construct; identical to SEQ ID NO: 39
  REGION 1..186: note = Description of Artificial Sequence: Synthetic Destabilizing Domain (DD)

SEQ ID NO: 6453 - protein, 186 aa, synthetic construct; identical to SEQ ID NO: 40
  REGION 1..186: note = Description of Artificial Sequence: Synthetic Destabilizing Domain (DD)

SEQ ID NO: 6454 - protein, 186 aa, synthetic construct; identical to SEQ ID NO: 41
  REGION 1..186: note = Description of Artificial Sequence: Synthetic Destabilizing Domain (DD)

SEQ ID NO: 6455 - protein, 186 aa, synthetic construct; identical to SEQ ID NO: 42
  REGION 1..186: note = Description of Artificial Sequence: Synthetic Destabilizing Domain (DD)

SEQ ID NO: 6456 - protein, 187 aa, synthetic construct; identical to SEQ ID NO: 43
  REGION 1..187: note = Description of Artificial Sequence: Synthetic Destabilizing Domain (DD)

SEQ ID NO: 6457 - protein, 187 aa, synthetic construct; identical to SEQ ID NO: 44
  REGION 1..187: note = Description of Artificial Sequence: Synthetic Destabilizing Domain (DD)

SEQ ID NO: 6458 - protein, 187 aa, synthetic construct; identical to SEQ ID NO: 45
  REGION 1..187: note = Description of Artificial Sequence: Synthetic Destabilizing Domain (DD)

SEQ ID NO: 6459 - protein, 187 aa, synthetic construct; identical to SEQ ID NO: 46
  REGION 1..187: note = Description of Artificial Sequence: Synthetic Destabilizing Domain (DD)

SEQ ID NO: 6460 - protein, 187 aa, synthetic construct; identical to SEQ ID NO: 47
  REGION 1..187: note = Description of Artificial Sequence: Synthetic Destabilizing Domain (DD)

SEQ ID NO: 6461 - protein, 187 aa, synthetic construct; identical to SEQ ID NO: 48
  REGION 1..187: note = Description of Artificial Sequence: Synthetic Destabilizing Domain (DD)

SEQ ID NO: 6462 - protein, 187 aa, synthetic construct; identical to SEQ ID NO: 49
  REGION 1..187: note = Description of Artificial Sequence: Synthetic Destabilizing Domain (DD)

SEQ ID NO: 6463 - protein, 187 aa, synthetic construct; identical to SEQ ID NO: 50
  REGION 1..187: note = Description of Artificial Sequence: Synthetic Destabilizing Domain (DD)

SEQ ID NO: 6464 - protein, 187 aa, synthetic construct; identical to SEQ ID NO: 51
  REGION 1..187: note = Description of Artificial Sequence: Synthetic Destabilizing Domain (DD)

SEQ ID NO: 6465 - protein, 187 aa, synthetic construct; identical to SEQ ID NO: 52
  REGION 1..187: note = Description of Artificial Sequence: Synthetic Destabilizing Domain (DD)

SEQ ID NO: 6466 - protein, 187 aa, synthetic construct; identical to SEQ ID NO: 53
  REGION 1..187: note = Description of Artificial Sequence: Synthetic Destabilizing Domain (DD)

SEQ ID NO: 6467 - protein, 187 aa, synthetic construct; identical to SEQ ID NO: 54
  REGION 1..187: note = Description of Artificial Sequence: Synthetic Destabilizing Domain (DD)

SEQ ID NO: 6468 - protein, 186 aa, synthetic construct; identical to SEQ ID NO: 55
  REGION 1..186: note = Description of Artificial Sequence: Synthetic Destabilizing Domain (DD)

SEQ ID NO: 6469 - protein, 186 aa, synthetic construct; identical to SEQ ID NO: 56
  REGION 1..186: note = Description of Artificial Sequence: Synthetic Destabilizing Domain (DD)

SEQ ID NO: 6470 - protein, 186 aa, synthetic construct; identical to SEQ ID NO: 57
  REGION 1..186: note = Description of Artificial Sequence: Synthetic Destabilizing Domain (DD)

SEQ ID NO: 6471 - protein, 186 aa, synthetic construct; identical to SEQ ID NO: 1196
  REGION 1..186: note = Description of Artificial Sequence: Synthetic Destabilizing Domain (DD)

SEQ ID NO: 6472 - protein, 187 aa, synthetic construct; identical to SEQ ID NO: 59
  REGION 1..187: note = Description of Artificial Sequence: Synthetic Destabilizing Domain (DD)

SEQ ID NO: 6473 - protein, 187 aa, synthetic construct; identical to SEQ ID NO: 60
  REGION 1..187: note = Description of Artificial Sequence: Synthetic Destabilizing Domain (DD)

SEQ ID NO: 6474 - protein, 186 aa, synthetic construct; identical to SEQ ID NO: 61
  REGION 1..186: note = Description of Artificial Sequence: Synthetic Destabilizing Domain (DD)

SEQ ID NO: 6475 - protein, 187 aa, synthetic construct; identical to SEQ ID NO: 62
  REGION 1..187: note = Description of Artificial Sequence: Synthetic Destabilizing Domain (DD)

SEQ ID NO: 6476 - protein, 187 aa, synthetic construct; identical to SEQ ID NO: 63
  REGION 1..187: note = Description of Artificial Sequence: Synthetic Destabilizing Domain (DD)

SEQ ID NO: 6477 - protein, 187 aa, synthetic construct; identical to SEQ ID NO: 64
  REGION 1..187: note = Description of Artificial Sequence: Synthetic Destabilizing Domain (DD)

SEQ ID NO: 6478 - protein, 187 aa, synthetic construct; identical to SEQ ID NO: 65
  REGION 1..187: note = Description of Artificial Sequence: Synthetic Destabilizing Domain (DD)

SEQ ID NO: 6479 - protein, 187 aa, synthetic construct; identical to SEQ ID NO: 66
  REGION 1..187: note = Description of Artificial Sequence: Synthetic Destabilizing Domain (DD)

SEQ ID NO: 6480 - protein, 187 aa, synthetic construct; identical to SEQ ID NO: 67
  REGION 1..187: note = Description of Artificial Sequence: Synthetic Destabilizing Domain (DD)

SEQ ID NO: 6481 - protein, 187 aa, synthetic construct; identical to SEQ ID NO: 68
  REGION 1..187: note = Description of Artificial Sequence: Synthetic Destabilizing Domain (DD)

SEQ ID NO: 6482 - protein, 187 aa, synthetic construct; identical to SEQ ID NO: 69
  REGION 1..187: note = Description of Artificial Sequence: Synthetic Destabilizing Domain (DD)

SEQ ID NO: 6483 - protein, 187 aa, synthetic construct; identical to SEQ ID NO: 70
  REGION 1..187: note = Description of Artificial Sequence: Synthetic Destabilizing Domain (DD)

SEQ ID NO: 6484 - protein, 186 aa, synthetic construct; identical to SEQ ID NO: 71
  REGION 1..186: note = Description of Artificial Sequence: Synthetic Destabilizing Domain (DD)

SEQ ID NO: 6485 - DNA, 561 bp, synthetic construct; identical to SEQ ID NO: 72
  misc_feature 1..561: note = Description of Artificial Sequence: Synthetic Destabilizing Domain (DD)
  source 1..561: mol_type = other DNA

SEQ ID NO: 6486 - DNA, 561 bp, synthetic construct; identical to SEQ ID NO: 73
  misc_feature 1..561: note = Description of Artificial Sequence: Synthetic Destabilizing Domain (DD)
  source 1..561: mol_type = other DNA

SEQ ID NO: 6487 - DNA, 561 bp, synthetic construct; identical to SEQ ID NO: 74
  misc_feature 1..561: note = Description of Artificial Sequence: Synthetic Destabilizing Domain (DD)
  source 1..561: mol_type = other DNA

SEQ ID NO: 6488 - DNA, 561 bp, synthetic construct; identical to SEQ ID NO: 75
  misc_feature 1..561: note = Description of Artificial Sequence: Synthetic Destabilizing Domain (DD)
  source 1..561: mol_type = other DNA

SEQ ID NO: 6489 - DNA, 561 bp, synthetic construct; identical to SEQ ID NO: 76
  misc_feature 1..561: note = Description of Artificial Sequence: Synthetic Destabilizing Domain (DD)
  source 1..561: mol_type = other DNA

SEQ ID NO: 6490 - DNA, 561 bp, synthetic construct; identical to SEQ ID NO: 77
  misc_feature 1..561: note = Description of Artificial Sequence: Synthetic Destabilizing Domain (DD)
  source 1..561: mol_type = other DNA

SEQ ID NO: 6491 - DNA, 561 bp, synthetic construct; identical to SEQ ID NO: 78
  misc_feature 1..561: note = Description of Artificial Sequence: Synthetic Destabilizing Domain (DD)
  source 1..561: mol_type = other DNA

SEQ ID NO: 6492 - DNA, 561 bp, synthetic construct; identical to SEQ ID NO: 79
  misc_feature 1..561: note = Description of Artificial Sequence: Synthetic Destabilizing Domain (DD)
  source 1..561: mol_type = other DNA

SEQ ID NO: 6493 - DNA, 561 bp, synthetic construct; identical to SEQ ID NO: 80
  misc_feature 1..561: note = Description of Artificial Sequence: Synthetic Destabilizing Domain (DD)
  source 1..561: mol_type = other DNA

SEQ ID NO: 6494 - DNA, 561 bp, synthetic construct; identical to SEQ ID NO: 81
  misc_feature 1..561: note = Description of Artificial Sequence: Synthetic Destabilizing Domain (DD)
  source 1..561: mol_type = other DNA

SEQ ID NO: 6495 - DNA, 561 bp, synthetic construct; identical to SEQ ID NO: 82
  misc_feature 1..561: note = Description of Artificial Sequence: Synthetic Destabilizing Domain (DD)
  source 1..561: mol_type = other DNA

SEQ ID NO: 6496 - DNA, 561 bp, synthetic construct; identical to SEQ ID NO: 83
  misc_feature 1..561: note = Description of Artificial Sequence: Synthetic Destabilizing Domain (DD)
  source 1..561: mol_type = other DNA

SEQ ID NO: 6497 - DNA, 561 bp, synthetic construct; identical to SEQ ID NO: 84
  misc_feature 1..561: note = Description of Artificial Sequence: Synthetic Destabilizing Domain (DD)
  source 1..561: mol_type = other DNA

SEQ ID NO: 6498 - DNA, 561 bp, synthetic construct; identical to SEQ ID NO: 85
  misc_feature 1..561: note = Description of Artificial Sequence: Synthetic Destabilizing Domain (DD)
  source 1..561: mol_type = other DNA

SEQ ID NO: 6499 - DNA, 558 bp, synthetic construct; identical to SEQ ID NO: 86
  misc_feature 1..558: note = Description of Artificial Sequence: Synthetic Destabilizing Domain (DD)
  source 1..558: mol_type = other DNA

SEQ ID NO: 6500 - DNA, 558 bp, synthetic construct; identical to SEQ ID NO: 87
  misc_feature 1..558: note = Description of Artificial Sequence: Synthetic Destabilizing Domain (DD)
  source 1..558: mol_type = other DNA

SEQ ID NO: 6501 - DNA, 558 bp, synthetic construct; identical to SEQ ID NO: 88
  misc_feature 1..558: note = Description of Artificial Sequence: Synthetic Destabilizing Domain (DD)
  source 1..558: mol_type = other DNA

SEQ ID NO: 6502 - DNA, 558 bp, synthetic construct; identical to SEQ ID NO: 89
  misc_feature 1..558: note = Description of Artificial Sequence: Synthetic Destabilizing Domain (DD)
  source 1..558: mol_type = other DNA

SEQ ID NO: 6503 - DNA, 561 bp, synthetic construct; identical to SEQ ID NO: 90
  misc_feature 1..561: note = Description of Artificial Sequence: Synthetic Destabilizing Domain (DD)
  source 1..561: mol_type = other DNA

SEQ ID NO: 6504 - DNA, 561 bp, synthetic construct; identical to SEQ ID NO: 91
  misc_feature 1..561: note = Description of Artificial Sequence: Synthetic Destabilizing Domain (DD)
  source 1..561: mol_type = other DNA

SEQ ID NO: 6505 - DNA, 561 bp, synthetic construct; identical to SEQ ID NO: 92
  misc_feature 1..561: note = Description of Artificial Sequence: Synthetic Destabilizing Domain (DD)
  source 1..561: mol_type = other DNA

SEQ ID NO: 6506 - DNA, 561 bp, synthetic construct; identical to SEQ ID NO: 93
  misc_feature 1..561: note = Description of Artificial Sequence: Synthetic Destabilizing Domain (DD)
  source 1..561: mol_type = other DNA

SEQ ID NO: 6507 - DNA, 561 bp, synthetic construct; identical to SEQ ID NO: 94
  misc_feature 1..561: note = Description of Artificial Sequence: Synthetic Destabilizing Domain (DD)
  source 1..561: mol_type = other DNA

SEQ ID NO: 6508 - DNA, 561 bp, synthetic construct; identical to SEQ ID NO: 95
  misc_feature 1..561: note = Description of Artificial Sequence: Synthetic Destabilizing Domain (DD)
  source 1..561: mol_type = other DNA

SEQ ID NO: 6509 - DNA, 561 bp, synthetic construct; identical to SEQ ID NO: 96
  misc_feature 1..561: note = Description of Artificial Sequence: Synthetic Destabilizing Domain (DD)
  source 1..561: mol_type = other DNA

SEQ ID NO: 6510 - DNA, 561 bp, synthetic construct; identical to SEQ ID NO: 97
  misc_feature 1..561: note = Description of Artificial Sequence: Synthetic Destabilizing Domain (DD)
  source 1..561: mol_type = other DNA

SEQ ID NO: 6511 - DNA, 561 bp, synthetic construct; identical to SEQ ID NO: 98
  misc_feature 1..561: note = Description of Artificial Sequence: Synthetic Destabilizing Domain (DD)
  source 1..561: mol_type = other DNA

SEQ ID NO: 6512 - DNA, 561 bp, synthetic construct; identical to SEQ ID NO: 99
  misc_feature 1..561: note = Description of Artificial Sequence: Synthetic Destabilizing Domain (DD)
  source 1..561: mol_type = other DNA

SEQ ID NO: 6513 - DNA, 561 bp, synthetic construct; identical to SEQ ID NO: 100
  misc_feature 1..561: note = Description of Artificial Sequence: Synthetic Destabilizing Domain (DD)
  source 1..561: mol_type = other DNA

SEQ ID NO: 6514 - DNA, 561 bp, synthetic construct; identical to SEQ ID NO: 101
  misc_feature 1..561: note = Description of Artificial Sequence: Synthetic Destabilizing Domain (DD)
  source 1..561: mol_type = other DNA

SEQ ID NO: 6515 - DNA, 561 bp, synthetic construct; identical to SEQ ID NO: 102
  misc_feature 1..561: note = Description of Artificial Sequence: Synthetic Destabilizing Domain (DD)
  source 1..561: mol_type = other DNA

SEQ ID NO: 6516 - DNA, 561 bp, synthetic construct; identical to SEQ ID NO: 103
  misc_feature 1..561: note = Description of Artificial Sequence: Synthetic Destabilizing Domain (DD)
  source 1..561: mol_type = other DNA

SEQ ID NO: 6517 - DNA, 561 bp, synthetic construct; identical to SEQ ID NO: 104
  misc_feature 1..561: note = Description of Artificial Sequence: Synthetic Destabilizing Domain (DD)
  source 1..561: mol_type = other DNA

SEQ ID NO: 6518 - DNA, 561 bp, synthetic construct; identical to SEQ ID NO: 105
  misc_feature 1..561: note = Description of Artificial Sequence: Synthetic Destabilizing Domain (DD)
  source 1..561: mol_type = other DNA

SEQ ID NO: 6519 - DNA, 561 bp, synthetic construct; identical to SEQ ID NO: 106
  misc_feature 1..561: note = Description of Artificial Sequence: Synthetic Destabilizing Domain (DD)
  source 1..561: mol_type = other DNA

SEQ ID NO: 6520 - DNA, 561 bp, synthetic construct; identical to SEQ ID NO: 107
  misc_feature 1..561: note = Description of Artificial Sequence: Synthetic Destabilizing Domain (DD)
  source 1..561: mol_type = other DNA

SEQ ID NO: 6521 - DNA, 561 bp, synthetic construct; identical to SEQ ID NO: 108
  misc_feature 1..561: note = Description of Artificial Sequence: Synthetic Destabilizing Domain (DD)
  source 1..561: mol_type = other DNA

SEQ ID NO: 6522 - DNA, 561 bp, synthetic construct; identical to SEQ ID NO: 109
  misc_feature 1..561: note = Description of Artificial Sequence: Synthetic Destabilizing Domain (DD)
  source 1..561: mol_type = other DNA

SEQ ID NO: 6523 - DNA, 561 bp, synthetic construct; identical to SEQ ID NO: 110
  misc_feature 1..561: note = Description of Artificial Sequence: Synthetic Destabilizing Domain (DD)
  source 1..561: mol_type = other DNA

SEQ ID NO: 6524 - DNA, 561 bp, synthetic construct; identical to SEQ ID NO: 111
  misc_feature 1..561: note = Description of Artificial Sequence: Synthetic Destabilizing Domain (DD)
  source 1..561: mol_type = other DNA

SEQ ID NO: 6525 - DNA, 561 bp, synthetic construct; identical to SEQ ID NO: 112
  misc_feature 1..561: note = Description of Artificial Sequence: Synthetic Destabilizing Domain (DD)
  source 1..561: mol_type = other DNA

SEQ ID NO: 6526 - DNA, 561 bp, synthetic construct; identical to SEQ ID NO: 113
  misc_feature 1..561: note = Description of Artificial Sequence: Synthetic Destabilizing Domain (DD)
  source 1..561: mol_type = other DNA

SEQ ID NO: 6527 - DNA, 561 bp, synthetic construct; identical to SEQ ID NO: 114
  misc_feature 1..561: note = Description of Artificial Sequence: Synthetic Destabilizing Domain (DD)
  source 1..561: mol_type = other DNA

SEQ ID NO: 6528 - DNA, 561 bp, synthetic construct; identical to SEQ ID NO: 115
  misc_feature 1..561: note = Description of Artificial Sequence: Synthetic Destabilizing Domain (DD)
  source 1..561: mol_type = other DNA

SEQ ID NO: 6529 - DNA, 561 bp, synthetic construct; identical to SEQ ID NO: 116
  misc_feature 1..561: note = Description of Artificial Sequence: Synthetic Destabilizing Domain (DD)
  source 1..561: mol_type = other DNA

SEQ ID NO: 6530 - DNA, 561 bp, synthetic construct; identical to SEQ ID NO: 117
  misc_feature 1..561: note = Description of Artificial Sequence: Synthetic Destabilizing Domain (DD)
  source 1..561: mol_type = other DNA

SEQ ID NO: 6531 - DNA, 561 bp, synthetic construct; identical to SEQ ID NO: 118
  misc_feature 1..561: note = Description of Artificial Sequence: Synthetic Destabilizing Domain (DD)
  source 1..561: mol_type = other DNA

SEQ ID NO: 6532 - DNA, 561 bp, synthetic construct; identical to SEQ ID NO: 119
  misc_feature 1..561: note = Description of Artificial Sequence: Synthetic Destabilizing Domain (DD)
  source 1..561: mol_type = other DNA

SEQ ID NO: 6533 - DNA, 561 bp, synthetic construct; identical to SEQ ID NO: 120
  misc_feature 1..561: note = Description of Artificial Sequence: Synthetic Destabilizing Domain (DD)
  source 1..561: mol_type = other DNA

SEQ ID NO: 6534 - DNA, 561 bp, synthetic construct; identical to SEQ ID NO: 121
  misc_feature 1..561: note = Description of Artificial Sequence: Synthetic Destabilizing Domain (DD)
  source 1..561: mol_type = other DNA

SEQ ID NO: 6535 - DNA, 561 bp, synthetic construct; identical to SEQ ID NO: 122
  misc_feature 1..561: note = Description of Artificial Sequence: Synthetic Destabilizing Domain (DD)
  source 1..561: mol_type = other DNA

SEQ ID NO: 6536 - DNA, 561 bp, synthetic construct; identical to SEQ ID NO: 123
  misc_feature 1..561: note = Description of Artificial Sequence: Synthetic Destabilizing Domain (DD)
  source 1..561: mol_type = other DNA

SEQ ID NO: 6537 - DNA, 561 bp, synthetic construct; identical to SEQ ID NO: 124
  misc_feature 1..561: note = Description of Artificial Sequence: Synthetic Destabilizing Domain (DD)
  source 1..561: mol_type = other DNA

SEQ ID NO: 6538 - DNA, 558 bp, synthetic construct; identical to SEQ ID NO: 125
  misc_feature 1..558: note = Description of Artificial Sequence: Synthetic Destabilizing Domain (DD)
  source 1..558: mol_type = other DNA

SEQ ID NO: 6539 - DNA, 558 bp, synthetic construct; identical to SEQ ID NO: 126
  misc_feature 1..558: note = Description of Artificial Sequence: Synthetic Destabilizing Domain (DD)
  source 1..558: mol_type = other DNA

SEQ ID NO: 6540 - DNA, 558 bp, synthetic construct; identical to SEQ ID NO: 127
  misc_feature 1..558: note = Description of Artificial Sequence: Synthetic Destabilizing Domain (DD)
  source 1..558: mol_type = other DNA

SEQ ID NO: 6541 - DNA, 558 bp, synthetic construct; identical to SEQ ID NO: 128
  misc_feature 1..558: note = Description of Artificial Sequence: Synthetic Destabilizing Domain (DD)
  source 1..558: mol_type = other DNA

SEQ ID NO: 6542 - DNA, 558 bp, synthetic construct; identical to SEQ ID NO: 129
  misc_feature 1..558: note = Description of Artificial Sequence: Synthetic Destabilizing Domain (DD)
  source 1..558: mol_type = other DNA

SEQ ID NO: 6543 - DNA, 558 bp, synthetic construct; identical to SEQ ID NO: 130
  misc_feature 1..558: note = Description of Artificial Sequence: Synthetic Destabilizing Domain (DD)
  source 1..558: mol_type = other DNA

SEQ ID NO: 6544 - DNA, 558 bp, synthetic construct; identical to SEQ ID NO: 131
  misc_feature 1..558: note = Description of Artificial Sequence: Synthetic Destabilizing Domain (DD)
  source 1..558: mol_type = other DNA

SEQ ID NO: 6545 - DNA, 558 bp, synthetic construct; identical to SEQ ID NO: 132
  misc_feature 1..558: note = Description of Artificial Sequence: Synthetic Destabilizing Domain (DD)
  source 1..558: mol_type = other DNA

SEQ ID NO: 6546 - DNA, 558 bp, synthetic construct; identical to SEQ ID NO: 133
  misc_feature 1..558: note = Description of Artificial Sequence: Synthetic Destabilizing Domain (DD)
  source 1..558: mol_type = other DNA

SEQ ID NO: 6547 - DNA, 558 bp, synthetic construct; identical to SEQ ID NO: 134
  misc_feature 1..558: note = Description of Artificial Sequence: Synthetic Destabilizing Domain (DD)
  source 1..558: mol_type = other DNA

SEQ ID NO: 6548 - DNA, 561 bp, synthetic construct; identical to SEQ ID NO: 135
  misc_feature 1..561: note = Description of Artificial Sequence: Synthetic Destabilizing Domain (DD)
  source 1..561: mol_type = other DNA

SEQ ID NO: 6549 - DNA, 561 bp, synthetic construct; identical to SEQ ID NO: 136
  misc_feature 1..561: note = Description of Artificial Sequence: Synthetic Destabilizing Domain (DD)
  source 1..561: mol_type = other DNA

SEQ ID NO: 6550 - DNA, 561 bp, synthetic construct; identical to SEQ ID NO: 137
  misc_feature 1..561: note = Description of Artificial Sequence: Synthetic Destabilizing Domain (DD)
  source 1..561: mol_type = other DNA

SEQ ID NO: 6551 - DNA, 561 bp, synthetic construct; identical to SEQ ID NO: 138
  misc_feature 1..561: note = Description of Artificial Sequence: Synthetic Destabilizing Domain (DD)
  source 1..561: mol_type = other DNA

SEQ ID NO: 6552 - DNA, 561 bp, synthetic construct; identical to SEQ ID NO: 139
  misc_feature 1..561: note = Description of Artificial Sequence: Synthetic Destabilizing Domain (DD)
  source 1..561: mol_type = other DNA

SEQ ID NO: 6553 - DNA, 561 bp, synthetic construct; identical to SEQ ID NO: 140
  misc_feature 1..561: note = Description of Artificial Sequence: Synthetic Destabilizing Domain (DD)
  source 1..561: mol_type = other DNA

SEQ ID NO: 6554 - DNA, 561 bp, synthetic construct; identical to SEQ ID NO: 141
  misc_feature 1..561: note = Description of Artificial Sequence: Synthetic Destabilizing Domain (DD)
  source 1..561: mol_type = other DNA

SEQ ID NO: 6555 - protein, 187 aa, synthetic construct; identical to SEQ ID NO: 2
  REGION 1..187: note = Description of Artificial Sequence: Synthetic Destabilizing Domain (DD)

SEQ ID NO: 6556 - protein, 187 aa, synthetic construct; identical to SEQ ID NO: 3
  REGION 1..187: note = Description of Artificial Sequence: Synthetic Destabilizing Domain (DD)

SEQ ID NO: 6557 - protein, 187 aa, synthetic construct; identical to SEQ ID NO: 4
  REGION 1..187: note = Description of Artificial Sequence: Synthetic Destabilizing Domain (DD)

SEQ ID NO: 6558 - protein, 187 aa, synthetic construct; identical to SEQ ID NO: 5
  REGION 1..187: note = Description of Artificial Sequence: Synthetic Destabilizing Domain (DD)

SEQ ID NO: 6559 - protein, 187 aa, synthetic construct; identical to SEQ ID NO: 6
  REGION 1..187: note = Description of Artificial Sequence: Synthetic Destabilizing Domain (DD)

SEQ ID NO: 6560 - protein, 187 aa, synthetic construct; identical to SEQ ID NO: 7
  REGION 1..187: note = Description of Artificial Sequence: Synthetic Destabilizing Domain (DD)

SEQ ID NO: 6561 - protein, 187 aa, synthetic construct; identical to SEQ ID NO: 8
  REGION 1..187: note = Description of Artificial Sequence: Synthetic Destabilizing Domain (DD)

SEQ ID NO: 6562 - protein, 187 aa, synthetic construct; identical to SEQ ID NO: 9
  REGION 1..187: note = Description of Artificial Sequence: Synthetic Destabilizing Domain (DD)

SEQ ID NO: 6563 - protein, 187 aa, synthetic construct; identical to SEQ ID NO: 10
  REGION 1..187: note = Description of Artificial Sequence: Synthetic Destabilizing Domain (DD)

SEQ ID NO: 6564 - protein, 187 aa, synthetic construct; identical to SEQ ID NO: 11
  REGION 1..187: note = Description of Artificial Sequence: Synthetic Destabilizing Domain (DD)

SEQ ID NO: 6565 - protein, 187 aa, synthetic construct; identical to SEQ ID NO: 12
  REGION 1..187: note = Description of Artificial Sequence: Synthetic Destabilizing Domain (DD)

SEQ ID NO: 6566 - protein, 186 aa, synthetic construct; identical to SEQ ID NO: 13
  REGION 1..186: note = Description of Artificial Sequence: Synthetic Destabilizing Domain (DD)

SEQ ID NO: 6567 - protein, 187 aa, synthetic construct; identical to SEQ ID NO: 14
  REGION 1..187: note = Description of Artificial Sequence: Synthetic Destabilizing Domain (DD)

SEQ ID NO: 6568 - protein, 187 aa, synthetic construct; identical to SEQ ID NO: 15
  REGION 1..187: note = Description of Artificial Sequence: Synthetic Destabilizing Domain (DD)

SEQ ID NO: 6569 - protein, 187 aa, synthetic construct; identical to SEQ ID NO: 16
  REGION 1..187: note = Description of Artificial Sequence: Synthetic Destabilizing Domain (DD)

SEQ ID NO: 6570 - protein, 187 aa, synthetic construct; identical to SEQ ID NO: 17
  REGION 1..187: note = Description of Artificial Sequence: Synthetic Destabilizing Domain (DD)

SEQ ID NO: 6571 - protein, 187 aa, synthetic construct; identical to SEQ ID NO: 18
  REGION 1..187: note = Description of Artificial Sequence: Synthetic Destabilizing Domain (DD)

SEQ ID NO: 6572 - protein, 187 aa, synthetic construct; identical to SEQ ID NO: 19
  REGION 1..187: note = Description of Artificial Sequence: Synthetic Destabilizing Domain (DD)

SEQ ID NO: 6573 - protein, 187 aa, synthetic construct; identical to SEQ ID NO: 20
  REGION 1..187: note = Description of Artificial Sequence: Synthetic Destabilizing Domain (DD)

SEQ ID NO: 6574 - protein, 187 aa, synthetic construct; identical to SEQ ID NO: 21
  REGION 1..187: note = Description of Artificial Sequence: Synthetic Destabilizing Domain (DD)

SEQ ID NO: 6575 - protein, 187 aa, synthetic construct; identical to SEQ ID NO: 22
  REGION 1..187: note = Description of Artificial Sequence: Synthetic Destabilizing Domain (DD)

SEQ ID NO: 6576 - protein, 187 aa, synthetic construct; identical to SEQ ID NO: 23
  REGION 1..187: note = Description of Artificial Sequence: Synthetic Destabilizing Domain (DD)

SEQ ID NO: 6577 - protein, 187 aa, synthetic construct; identical to SEQ ID NO: 24
  REGION 1..187: note = Description of Artificial Sequence: Synthetic Destabilizing Domain (DD)

SEQ ID NO: 6578 - protein, 187 aa, synthetic construct; identical to SEQ ID NO: 25
  REGION 1..187: note = Description of Artificial Sequence: Synthetic Destabilizing Domain (DD)

SEQ ID NO: 6579 - protein, 187 aa, synthetic construct; identical to SEQ ID NO: 26
  REGION 1..187: note = Description of Artificial Sequence: Synthetic Destabilizing Domain (DD)

SEQ ID NO: 6580 - protein, 187 aa, synthetic construct; identical to SEQ ID NO: 27
  REGION 1..187: note = Description of Artificial Sequence: Synthetic Destabilizing Domain (DD)

SEQ ID NO: 6581 - protein, 187 aa, synthetic construct; identical to SEQ ID NO: 28
  REGION 1..187: note = Description of Artificial Sequence: Synthetic Destabilizing Domain (DD)

SEQ ID NO: 6582 - protein, 187 aa, synthetic construct; identical to SEQ ID NO: 29
  REGION 1..187: note = Description of Artificial Sequence: Synthetic Destabilizing Domain (DD)

SEQ ID NO: 6583 - protein, 187 aa, synthetic construct; identical to SEQ ID NO: 30
  REGION 1..187: note = Description of Artificial Sequence: Synthetic Destabilizing Domain (DD)

SEQ ID NO: 6584 - protein, 187 aa, synthetic construct; identical to SEQ ID NO: 31
  REGION 1..187: note = Description of Artificial Sequence: Synthetic Destabilizing Domain (DD)

SEQ ID NO: 6585 - protein, 186 aa, synthetic construct; identical to SEQ ID NO: 32
  REGION 1..186: note = Description of Artificial Sequence: Synthetic Destabilizing Domain (DD)

SEQ ID NO: 6586 - protein, 186 aa, synthetic construct; identical to SEQ ID NO: 33
  REGION 1..186: note = Description of Artificial Sequence: Synthetic Destabilizing Domain (DD)

SEQ ID NO: 6587 - protein, 186 aa, synthetic construct; identical to SEQ ID NO: 34
  REGION 1..186: note = Description of Artificial Sequence: Synthetic Destabilizing Domain (DD)

SEQ ID NO: 6588 - protein, 186 aa, synthetic construct; identical to SEQ ID NO: 35
  REGION 1..186: note = Description of Artificial Sequence: Synthetic Destabilizing Domain (DD)

SEQ ID NO: 6589 - protein, 186 aa, synthetic construct; identical to SEQ ID NO: 36
  REGION 1..186: note = Description of Artificial Sequence: Synthetic Destabilizing Domain (DD)

SEQ ID NO: 6590 - protein, 186 aa, synthetic construct; identical to SEQ ID NO: 37
  REGION 1..186: note = Description of Artificial Sequence: Synthetic Destabilizing Domain (DD)

SEQ ID NO: 6591 - protein, 186 aa, synthetic construct; identical to SEQ ID NO: 38
  REGION 1..186: note = Description of Artificial Sequence: Synthetic Destabilizing Domain (DD)

SEQ ID NO: 6592 - protein, 186 aa, synthetic construct; identical to SEQ ID NO: 39
  REGION 1..186: note = Description of Artificial Sequence: Synthetic Destabilizing Domain (DD)

SEQ ID NO: 6593 - protein, 186 aa, synthetic construct; identical to SEQ ID NO: 40
  REGION 1..186: note = Description of Artificial Sequence: Synthetic Destabilizing Domain (DD)

SEQ ID NO: 6594 - protein, 186 aa, synthetic construct; identical to SEQ ID NO: 41
  REGION 1..186: note = Description of Artificial Sequence: Synthetic Destabilizing Domain (DD)

SEQ ID NO: 6595 - protein, 186 aa, synthetic construct; identical to SEQ ID NO: 42
  REGION 1..186: note = Description of Artificial Sequence: Synthetic Destabilizing Domain (DD)

SEQ ID NO: 6596 - protein, 187 aa, synthetic construct; identical to SEQ ID NO: 43
  REGION 1..187: note = Description of Artificial Sequence: Synthetic Destabilizing Domain (DD)

SEQ ID NO: 6597 - protein, 187 aa, synthetic construct; identical to SEQ ID NO: 44
  REGION 1..187: note = Description of Artificial Sequence: Synthetic Destabilizing Domain (DD)

SEQ ID NO: 6598 - protein, 187 aa, synthetic construct; identical to SEQ ID NO: 45
  REGION 1..187: note = Description of Artificial Sequence: Synthetic Destabilizing Domain (DD)

SEQ ID NO: 6599 - protein, 187 aa, synthetic construct; identical to SEQ ID NO: 46
  REGION 1..187: note = Description of Artificial Sequence: Synthetic Destabilizing Domain (DD)

SEQ ID NO: 6600 - protein, 187 aa, synthetic construct; identical to SEQ ID NO: 47
  REGION 1..187: note = Description of Artificial Sequence: Synthetic Destabilizing Domain (DD)

SEQ ID NO: 6601 - protein, 187 aa, synthetic construct; identical to SEQ ID NO: 48
  REGION 1..187: note = Description of Artificial Sequence: Synthetic Destabilizing Domain (DD)

SEQ ID NO: 6602 - protein, 187 aa, synthetic construct; identical to SEQ ID NO: 49
  REGION 1..187: note = Description of Artificial Sequence: Synthetic Destabilizing Domain (DD)

SEQ ID NO: 6603 - protein, 187 aa, synthetic construct; identical to SEQ ID NO: 50
  REGION 1..187: note = Description of Artificial Sequence: Synthetic Destabilizing Domain (DD)

SEQ ID NO: 6604 - protein, 187 aa, synthetic construct; identical to SEQ ID NO: 51
  REGION 1..187: note = Description of Artificial Sequence: Synthetic Destabilizing Domain (DD)

SEQ ID NO: 6605 - protein, 187 aa, synthetic construct; identical to SEQ ID NO: 52
  REGION 1..187: note = Description of Artificial Sequence: Synthetic Destabilizing Domain (DD)

SEQ ID NO: 6606 - protein, 187 aa, synthetic construct; identical to SEQ ID NO: 53
  REGION 1..187: note = Description of Artificial Sequence: Synthetic Destabilizing Domain (DD)

SEQ ID NO: 6607 - protein, 187 aa, synthetic construct; identical to SEQ ID NO: 54
  REGION 1..187: note = Description of Artificial Sequence: Synthetic Destabilizing Domain (DD)

SEQ ID NO: 6608 - protein, 186 aa, synthetic construct; identical to SEQ ID NO: 55
  REGION 1..186: note = Description of Artificial Sequence: Synthetic Destabilizing Domain (DD)

SEQ ID NO: 6609 - protein, 186 aa, synthetic construct; identical to SEQ ID NO: 56
  REGION 1..186: note = Description of Artificial Sequence: Synthetic Destabilizing Domain (DD)

SEQ ID NO: 6610 - protein, 186 aa, synthetic construct; identical to SEQ ID NO: 57
  REGION 1..186: note = Description of Artificial Sequence: Synthetic Destabilizing Domain (DD)

SEQ ID NO: 6611 - protein, 186 aa, synthetic construct; identical to SEQ ID NO: 1196
  REGION 1..186: note = Description of Artificial Sequence: Synthetic Destabilizing Domain (DD)

SEQ ID NO: 6612 - protein, 187 aa, synthetic construct; identical to SEQ ID NO: 59
  REGION 1..187: note = Description of Artificial Sequence: Synthetic Destabilizing Domain (DD)

SEQ ID NO: 6613 - protein, 187 aa, synthetic construct; identical to SEQ ID NO: 60
  REGION 1..187: note = Description of Artificial Sequence: Synthetic Destabilizing Domain (DD)

SEQ ID NO: 6614 - protein, 186 aa, synthetic construct; identical to SEQ ID NO: 61
  REGION 1..186: note = Description of Artificial Sequence: Synthetic Destabilizing Domain (DD)

SEQ ID NO: 6615 - protein, 187 aa, synthetic construct; identical to SEQ ID NO: 62
  REGION 1..187: note = Description of Artificial Sequence: Synthetic Destabilizing Domain (DD)

SEQ ID NO: 6616 - protein, 187 aa, synthetic construct; identical to SEQ ID NO: 63
  REGION 1..187: note = Description of Artificial Sequence: Synthetic Destabilizing Domain (DD)

SEQ ID NO: 6617 - protein, 187 aa, synthetic construct; identical to SEQ ID NO: 64
  REGION 1..187: note = Description of Artificial Sequence: Synthetic Destabilizing Domain (DD)

SEQ ID NO: 6618 - protein, 187 aa, synthetic construct; identical to SEQ ID NO: 65
  REGION 1..187: note = Description of Artificial Sequence: Synthetic Destabilizing Domain (DD)

SEQ ID NO: 6619 - protein, 187 aa, synthetic construct; identical to SEQ ID NO: 66
  REGION 1..187: note = Description of Artificial Sequence: Synthetic Destabilizing Domain (DD)

SEQ ID NO: 6620 - protein, 187 aa, synthetic construct; identical to SEQ ID NO: 67
  REGION 1..187: note = Description of Artificial Sequence: Synthetic Destabilizing Domain (DD)

SEQ ID NO: 6621 - protein, 187 aa, synthetic construct; identical to SEQ ID NO: 68
  REGION 1..187: note = Description of Artificial Sequence: Synthetic Destabilizing Domain (DD)

SEQ ID NO: 6622 - protein, 187 aa, synthetic construct; identical to SEQ ID NO: 69
  REGION 1..187: note = Description of Artificial Sequence: Synthetic Destabilizing Domain (DD)

SEQ ID NO: 6623 - protein, 187 aa, synthetic construct; identical to SEQ ID NO: 70
  REGION 1..187: note = Description of Artificial Sequence: Synthetic Destabilizing Domain (DD)

SEQ ID NO: 6624 - protein, 186 aa, synthetic construct; identical to SEQ ID NO: 71
  REGION 1..186: note = Description of Artificial Sequence: Synthetic Destabilizing Domain (DD)

SEQ ID NO: 6625 - DNA, 1305 bp, synthetic construct; identical to SEQ ID NO: 142
  misc_feature 1..1305: note = Description of Artificial Sequence: Synthetic polynucleotide
  source 1..1305: mol_type = other DNA

SEQ ID NO: 6626 - DNA, 1302 bp, synthetic construct; identical to SEQ ID NO: 143
  misc_feature 1..1302: note = Description of Artificial Sequence: Synthetic polynucleotide
  source 1..1302: mol_type = other DNA

SEQ ID NO: 6627 - DNA, 1215 bp, synthetic construct; identical to SEQ ID NO: 144
  misc_feature 1..1215: note = Description of Artificial Sequence: Synthetic polynucleotide
  source 1..1215: mol_type = other DNA

SEQ ID NO: 6628 - DNA, 1305 bp, synthetic construct; identical to SEQ ID NO: 145
  misc_feature 1..1305: note = Description of Artificial Sequence: Synthetic polynucleotide
  source 1..1305: mol_type = other DNA

SEQ ID NO: 6629 - DNA, 1305 bp, synthetic construct; identical to SEQ ID NO: 146
  misc_feature 1..1305: note = Description of Artificial Sequence: Synthetic polynucleotide
  source 1..1305: mol_type = other DNA

SEQ ID NO: 6630 - DNA, 1305 bp, synthetic construct; identical to SEQ ID NO: 147
  misc_feature 1..1305: note = Description of Artificial Sequence: Synthetic polynucleotide
  source 1..1305: mol_type = other DNA

SEQ ID NO: 6631 - DNA, 1305 bp, synthetic construct; identical to SEQ ID NO: 148
  misc_feature 1..1305: note = Description of Artificial Sequence: Synthetic polynucleotide
  source 1..1305: mol_type = other DNA

SEQ ID NO: 6632 - DNA, 1305 bp, synthetic construct; identical to SEQ ID NO: 149
  misc_feature 1..1305: note = Description of Artificial Sequence: Synthetic polynucleotide
  source 1..1305: mol_type = other DNA

SEQ ID NO: 6633 - DNA, 1305 bp, synthetic construct; identical to SEQ ID NO: 150
  misc_feature 1..1305: note = Description of Artificial Sequence: Synthetic polynucleotide
  source 1..1305: mol_type = other DNA

SEQ ID NO: 6634 - DNA, 1305 bp, synthetic construct; identical to SEQ ID NO: 151
  misc_feature 1..1305: note = Description of Artificial Sequence: Synthetic polynucleotide
  source 1..1305: mol_type = other DNA

SEQ ID NO: 6635 - DNA, 1305 bp, synthetic construct; identical to SEQ ID NO: 152
  misc_feature 1..1305: note = Description of Artificial Sequence: Synthetic polynucleotide
  source 1..1305: mol_type = other DNA

SEQ ID NO: 6636 - DNA, 1305 bp, synthetic construct; identical to SEQ ID NO: 153
  misc_feature 1..1305: note = Description of Artificial Sequence: Synthetic polynucleotide
  source 1..1305: mol_type = other DNA

SEQ ID NO: 6637 - DNA, 1305 bp, synthetic construct; identical to SEQ ID NO: 154
  misc_feature 1..1305: note = Description of Artificial Sequence: Synthetic polynucleotide
  source 1..1305: mol_type = other DNA

SEQ ID NO: 6638 - DNA, 1302 bp, synthetic construct; identical to SEQ ID NO: 155
  misc_feature 1..1302: note = Description of Artificial Sequence: Synthetic polynucleotide
  source 1..1302: mol_type = other DNA

SEQ ID NO: 6639 - DNA, 1302 bp, synthetic construct; identical to SEQ ID NO: 156
  misc_feature 1..1302: note = Description of Artificial Sequence: Synthetic polynucleotide
  source 1..1302: mol_type = other DNA

SEQ ID NO: 6640 - DNA, 1302 bp, synthetic construct; identical to SEQ ID NO: 157
  misc_feature 1..1302: note = Description of Artificial Sequence: Synthetic polynucleotide
  source 1..1302: mol_type = other DNA

SEQ ID NO: 6641 - DNA, 1302 bp, synthetic construct; identical to SEQ ID NO: 158
  misc_feature 1..1302: note = Description of Artificial Sequence: Synthetic polynucleotide
  source 1..1302: mol_type = other DNA

SEQ ID NO: 6642 - DNA, 1302 bp, synthetic construct; identical to SEQ ID NO: 159
  misc_feature 1..1302: note = Description of Artificial Sequence: Synthetic polynucleotide
  source 1..1302: mol_type = other DNA

SEQ ID NO: 6643 - DNA, 1302 bp, synthetic construct; identical to SEQ ID NO: 160
  misc_feature 1..1302: note = Description of Artificial Sequence: Synthetic polynucleotide
  source 1..1302: mol_type = other DNA

SEQ ID NO: 6644 - DNA, 1302 bp, synthetic construct; identical to SEQ ID NO: 161
  misc_feature 1..1302: note = Description of Artificial Sequence: Synthetic polynucleotide
  source 1..1302: mol_type = other DNA

SEQ ID NO: 6645 - DNA, 1302 bp, synthetic construct; identical to SEQ ID NO: 162
  misc_feature 1..1302: note = Description of Artificial Sequence: Synthetic polynucleotide
  source 1..1302: mol_type = other DNA

SEQ ID NO: 6646 - DNA, 1305 bp, synthetic construct; identical to SEQ ID NO: 154
  misc_feature 1..1305: note = Description of Artificial Sequence: Synthetic polynucleotide
  source 1..1305: mol_type = other DNA

SEQ ID NO: 6647 - DNA, 1302 bp, synthetic construct; identical to SEQ ID NO: 164
  misc_feature 1..1302: note = Description of Artificial Sequence: Synthetic polynucleotide
  source 1..1302: mol_type = other DNA

SEQ ID NO: 6648 - DNA, 2034 bp, synthetic construct; identical to SEQ ID NO: 165
  misc_feature 1..2034: note = Description of Artificial Sequence: Synthetic Construct
  source 1..2034: mol_type = other DNA

SEQ ID NO: 6649 - DNA, 2034 bp, synthetic construct; identical to SEQ ID NO: 166
  misc_feature 1..2034: note = Description of Artificial Sequence: Synthetic Construct
  source 1..2034: mol_type = other DNA

SEQ ID NO: 6650 - DNA, 2034 bp, synthetic construct; identical to SEQ ID NO: 167
  misc_feature 1..2034: note = Description of Artificial Sequence: Synthetic Construct
  source 1..2034: mol_type = other DNA

SEQ ID NO: 6651 - DNA, 2034 bp, synthetic construct; identical to SEQ ID NO: 1707
  misc_feature 1..2034: note = Description of Artificial Sequence: Synthetic Construct
  source 1..2034: mol_type = other DNA

SEQ ID NO: 6652 - DNA, 1188 bp, synthetic construct; identical to SEQ ID NO: 169
  misc_feature 1..1188: note = Description of Artificial Sequence: Synthetic polynucleotide
  source 1..1188: mol_type = other DNA

SEQ ID NO: 6653 - DNA, 1752 bp, synthetic construct; identical to SEQ ID NO: 170
  misc_feature 1..1752: note = Description of Artificial Sequence: Synthetic polynucleotide
  source 1..1752: mol_type = other DNA

SEQ ID NO: 6654 - DNA, 1752 bp, synthetic construct; identical to SEQ ID NO: 171
  misc_feature 1..1752: note = Description of Artificial Sequence: Synthetic polynucleotide
  source 1..1752: mol_type = other DNA

SEQ ID NO: 6655 - DNA, 1623 bp, synthetic construct; identical to SEQ ID NO: 172
  misc_feature 1..1623: note = Description of Artificial Sequence: Synthetic polynucleotide
  source 1..1623: mol_type = other DNA

SEQ ID NO: 6656 - DNA, 2214 bp, synthetic construct; identical to SEQ ID NO: 173
  misc_feature 1..2214: note = Description of Artificial Sequence: Synthetic polynucleotide
  source 1..2214: mol_type = other DNA

SEQ ID NO: 6657 - DNA, 2062 bp, synthetic construct; identical to SEQ ID NO: 174
  misc_feature 1..2062: note = Description of Artificial Sequence: Synthetic Construct
  source 1..2062: mol_type = other DNA

SEQ ID NO: 6658 - DNA, 2062 bp, synthetic construct; identical to SEQ ID NO: 175
  misc_feature 1..2062: note = Description of Artificial Sequence: Synthetic Construct
  source 1..2062: mol_type = other DNA

SEQ ID NO: 6659 - DNA, 2061 bp, synthetic construct; identical to SEQ ID NO: 176
  misc_feature 1..2061: note = Description of Artificial Sequence: Synthetic Construct
  source 1..2061: mol_type = other DNA

SEQ ID NO: 6660 - DNA, 2061 bp, synthetic construct; identical to SEQ ID NO: 177
  misc_feature 1..2061: note = Description of Artificial Sequence: Synthetic Construct
  source 1..2061: mol_type = other DNA

SEQ ID NO: 6661 - DNA, 1824 bp, synthetic construct; identical to SEQ ID NO: 178
  misc_feature 1..1824: note = Description of Artificial Sequence: Synthetic polynucleotide
  source 1..1824: mol_type = other DNA

SEQ ID NO: 6662 - DNA, 1824 bp, synthetic construct; identical to SEQ ID NO: 179
  misc_feature 1..1824: note = Description of Artificial Sequence: Synthetic polynucleotide
  source 1..1824: mol_type = other DNA

SEQ ID NO: 6663 - DNA, 1824 bp, synthetic construct; identical to SEQ ID NO: 180
  misc_feature 1..1824: note = Description of Artificial Sequence: Synthetic polynucleotide
  source 1..1824: mol_type = other DNA

SEQ ID NO: 6664 - DNA, 2217 bp, synthetic construct; identical to SEQ ID NO: 181
  misc_feature 1..2217: note = Description of Artificial Sequence: Synthetic polynucleotide
  source 1..2217: mol_type = other DNA

SEQ ID NO: 6665 - DNA, 2217 bp, synthetic construct; identical to SEQ ID NO: 182
  misc_feature 1..2217: note = Description of Artificial Sequence: Synthetic polynucleotide
  source 1..2217: mol_type = other DNA

SEQ ID NO: 6666 - DNA, 2217 bp, synthetic construct; identical to SEQ ID NO: 183
  misc_feature 1..2217: note = Description of Artificial Sequence: Synthetic polynucleotide
  source 1..2217: mol_type = other DNA

SEQ ID NO: 6667 - DNA, 2217 bp, synthetic construct; identical to SEQ ID NO: 184
  misc_feature 1..2217: note = Description of Artificial Sequence: Synthetic polynucleotide
  source 1..2217: mol_type = other DNA

SEQ ID NO: 6668 - DNA, 1281 bp, synthetic construct; identical to SEQ ID NO: 185
  misc_feature 1..1281: note = Description of Artificial Sequence: Synthetic polynucleotide
  source 1..1281: mol_type = other DNA

SEQ ID NO: 6669 - DNA, 1302 bp, synthetic construct; identical to SEQ ID NO: 186
  misc_feature 1..1302: note = Description of Artificial Sequence: Synthetic Construct
  source 1..1302: mol_type = other DNA

SEQ ID NO: 6670 - DNA, 1302 bp, synthetic construct; identical to SEQ ID NO: 187
  misc_feature 1..1302: note = Description of Artificial Sequence: Synthetic Construct
  source 1..1302: mol_type = other DNA

SEQ ID NO: 6671 - DNA, 1302 bp, synthetic construct; identical to SEQ ID NO: 188
  misc_feature 1..1302: note = Description of Artificial Sequence: Synthetic Construct
  source 1..1302: mol_type = other DNA

SEQ ID NO: 6672 - DNA, 1302 bp, synthetic construct; identical to SEQ ID NO: 189
  misc_feature 1..1302: note = Description of Artificial Sequence: Synthetic Construct
  source 1..1302: mol_type = other DNA

SEQ ID NO: 6673 - DNA, 1302 bp, synthetic construct; identical to SEQ ID NO: 190
  misc_feature 1..1302: note = Description of Artificial Sequence: Synthetic Construct
  source 1..1302: mol_type = other DNA

SEQ ID NO: 6674 - protein, 107 aa, Homo sapiens; identical to SEQ ID NO: 192

SEQ ID NO: 6675 - protein, 159 aa, Escherichia coli [sequence omitted]

SEQ ID NO: 6676 - protein, 187 aa, Homo sapiens; identical to SEQ ID NO: 1

SEQ ID NO: 6677 - protein, 327 aa, Homo sapiens; identical to SEQ ID NO: 195

SEQ ID NO: 6678 - protein, 189 aa, Homo sapiens; identical to SEQ ID NO: 196

SEQ ID NO: 6679 - protein, 260 aa, Homo sapiens; identical to SEQ ID NO: 197

SEQ ID NO: 6680 - protein, 231 aa, Homo sapiens; identical to SEQ ID NO: 198

SEQ ID NO: 6681 - protein, 449 aa, synthetic construct; identical to SEQ ID NO: 199
  REGION 1..449: note = Description of Artificial Sequence: Synthetic heavy chain variable domain

SEQ ID NO: 6682 - protein, 223 aa, synthetic construct; identical to SEQ ID NO: 200
  REGION 1..223: note = Description of Artificial Sequence: Synthetic heavy chain variable domain

SEQ ID NO: 6683 - protein, 234 aa, synthetic construct; identical to SEQ ID NO: 201
  REGION 1..234: note = Description of Artificial Sequence: Synthetic heavy chain variable domain

SEQ ID NO: 6684 - protein, 460 aa, synthetic construct; identical to SEQ ID NO: 202
  REGION 1..460: note = Description of Artificial Sequence: Synthetic heavy chain variable domain

SEQ ID NO: 6685 - protein, 241 aa, synthetic construct; identical to SEQ ID NO: 203
  REGION 1..241: note = Description of Artificial Sequence: Synthetic heavy chain variable domain

SEQ ID NO: 6686 - protein, 471 aa, synthetic construct; identical to SEQ ID NO: 204
  REGION 1..471: note = Description of Artificial Sequence: Synthetic heavy chain variable domain

SEQ ID NO: 6687 - protein, 120 aa, synthetic construct; identical to SEQ ID NO: 205
  REGION 1..120: note = Description of Artificial Sequence: Synthetic heavy chain variable domain

SEQ ID NO: 6688 - protein, 111 aa, synthetic construct; identical to SEQ ID NO: 206
  REGION 1..111: note = Description of Artificial Sequence: Synthetic heavy chain variable domain

SEQ ID NO: 6689 - protein, 464 aa, synthetic construct; identical to SEQ ID NO: 207
  REGION 1..464: note = Description of Artificial Sequence: Synthetic heavy chain variable domain

SEQ ID NO: 6690 - protein, 137 aa, synthetic construct; identical to SEQ ID NO: 208
  REGION 1..137: note = Description of Artificial Sequence: Synthetic heavy chain variable domain

SEQ ID NO: 6691 - protein, 124 aa, synthetic construct; identical to SEQ ID NO: 209
  REGION 1..124: note = Description of Artificial Sequence: Synthetic heavy chain variable domain

SEQ ID NO: 6692 - protein, 130 aa, synthetic construct; identical to SEQ ID NO: 210
  REGION 1..130: note = Description of Artificial Sequence: Synthetic heavy chain variable domain

SEQ ID NO: 6693 - protein, 125 aa, synthetic construct; identical to SEQ ID NO: 211
  REGION 1..125: note = Description of Artificial Sequence: Synthetic heavy chain variable domain

SEQ ID NO: 6694 - protein, 125 aa, synthetic construct; identical to SEQ ID NO: 212
  REGION 1..125: note = Description of Artificial Sequence: Synthetic heavy chain variable domain

SEQ ID NO: 6695 - protein, 228 aa, synthetic construct; identical to SEQ ID NO: 213
  REGION 1..228: note = Description of Artificial Sequence: Synthetic heavy chain variable domain

SEQ ID NO: 6696 - protein, 98 aa, synthetic construct; identical to SEQ ID NO: 214
  REGION 1..98: note = Description of Artificial Sequence: Synthetic heavy chain variable domain
  MOD_RES 64..65: note = Any amino acid
  MOD_RES 68..69: note = Any amino acid
  MOD_RES 93: note = Any amino acid
  MOD_RES 98: note = Any amino acid

SEQ ID NO: 6697 - protein, 125 aa, synthetic construct; identical to SEQ ID NO: 215
  REGION 1..125: note = Description of Artificial Sequence: Synthetic heavy chain variable domain
  MOD_RES 76: note = Any amino acid

SEQ ID NO: 6698 - protein, 125 aa, synthetic construct; identical to SEQ ID NO: 216
  REGION 1..125: note = Description of Artificial Sequence: Synthetic heavy chain variable domain

SEQ ID NO: 6699 - protein, 125 aa, synthetic construct; identical to SEQ ID NO: 217
  REGION 1..125: note = Description of Artificial Sequence: Synthetic heavy chain variable domain

SEQ ID NO: 6700 - protein, 125 aa, synthetic construct; identical to SEQ ID NO: 218
  REGION 1..125: note = Description of Artificial Sequence: Synthetic heavy chain variable domain

SEQ ID NO: 6701 - protein, 125 aa, synthetic construct; identical to SEQ ID NO: 219
  REGION 1..125: note = Description of Artificial Sequence: Synthetic heavy chain variable domain

SEQ ID NO: 6702 - protein, 125 aa, synthetic construct; identical to SEQ ID NO: 220
  REGION 1..125: note = Description of Artificial Sequence: Synthetic heavy chain variable domain

SEQ ID NO: 6703 - protein, 125 aa, synthetic construct; identical to SEQ ID NO: 221
  REGION 1..125: note = Description of Artificial Sequence: Synthetic heavy chain variable domain

SEQ ID NO: 6704 - protein, 464 aa, synthetic construct; identical to SEQ ID NO: 207
  REGION 1..464: note = Description of Artificial Sequence: Synthetic heavy chain variable domain

SEQ ID NO: 6705 - protein, 120 aa, synthetic construct; identical to SEQ ID NO: 205
  REGION 1..120: note = Description of Artificial Sequence: Synthetic heavy chain variable domain

SEQ ID NO: 6706 - protein, 218 aa, synthetic construct; identical to SEQ ID NO: 224
  REGION 1..218: note = Description of Artificial Sequence: Synthetic heavy chain variable domain

SEQ ID NO: 6707 - protein, 219 aa, synthetic construct; identical to SEQ ID NO: 225
  REGION 1..219: note = Description of Artificial Sequence: Synthetic heavy chain variable domain

SEQ ID NO: 6708 - protein, 460 aa, synthetic construct; identical to SEQ ID NO: 202
  REGION 1..460: note = Description of Artificial Sequence: Synthetic heavy chain variable domain

SEQ ID NO: 6709 - protein, 242 aa, synthetic construct; identical to SEQ ID NO: 227
  REGION 1..242: note = Description of Artificial Sequence: Synthetic heavy chain variable domain

SEQ ID NO: 6710 - protein, 471 aa, synthetic construct; identical to SEQ ID NO: 204
  REGION 1..471: note = Description of Artificial Sequence: Synthetic heavy chain variable domain

SEQ ID NO: 6711 - protein, 118 aa, synthetic construct; identical to SEQ ID NO: 229
  REGION 1..118: note = Description of Artificial Sequence: Synthetic heavy chain variable domain

SEQ ID NO: 6712 - protein, 119 aa, synthetic construct; identical to SEQ ID NO: 230
  REGION 1..119: note = Description of Artificial Sequence: Synthetic heavy chain variable domain

SEQ ID NO: 6713 - protein, 112 aa, synthetic construct; identical to SEQ ID NO: 231
  REGION 1..112: note = Description of Artificial Sequence: Synthetic light chain variable domain

SEQ ID NO: 6714 - protein, 447 aa, synthetic construct; identical to SEQ ID NO: 232
  REGION 1..447: note = Description of Artificial Sequence: Synthetic light chain variable domain

SEQ ID NO: 6715 - protein, 111 aa, synthetic construct; identical to SEQ ID NO: 233
  REGION 1..111: note = Description of Artificial Sequence: Synthetic light chain variable domain

SEQ ID NO: 6716 - protein, 107 aa, synthetic construct; identical to SEQ ID NO: 234
  REGION 1..107: note = Description of Artificial Sequence: Synthetic light chain variable domain

SEQ ID NO: 6717 - protein, 214 aa, synthetic construct; identical to SEQ ID NO: 235
  REGION 1..214: note = Description of Artificial Sequence: Synthetic light chain variable domain

SEQ ID NO: 6718 - protein, 237 aa, synthetic construct; identical to SEQ ID NO: 236
  REGION 1..237: note = Description of Artificial Sequence: Synthetic light chain variable domain

SEQ ID NO: 6719 - protein, 107 aa, synthetic construct; identical to SEQ ID NO: 237
  REGION 1..107: note = Description of Artificial Sequence: Synthetic light chain variable domain

SEQ ID NO: 6720 - protein, 107 aa, synthetic construct; identical to SEQ ID NO: 237
  REGION 1..107: note = Description of Artificial Sequence: Synthetic light chain variable domain

SEQ ID NO: 6721 - protein, 115 aa, synthetic construct; identical to SEQ ID NO: 239
  REGION 1..115: note = Description of Artificial Sequence: Synthetic light chain variable domain

SEQ ID NO: 6722 - protein, 107 aa, synthetic construct; identical to SEQ ID NO: 237
  REGION 1..107: note = Description of Artificial Sequence: Synthetic light chain variable domain

SEQ ID NO: 6723 - protein, 112 aa, synthetic construct; identical to SEQ ID NO: 241
  REGION 1..112: note = Description of Artificial Sequence: Synthetic light chain variable domain

SEQ ID NO: 6724 - protein, 106 aa, synthetic construct; identical to SEQ ID NO: 242
  REGION 1..106: note = Description of Artificial Sequence: Synthetic light chain variable domain

SEQ ID NO: 6725 - protein, 106 aa, synthetic construct; identical to SEQ ID NO: 243
  REGION 1..106: note = Description of Artificial Sequence: Synthetic light chain variable domain

SEQ ID NO: 6726 - protein, 110 aa, synthetic construct; identical to SEQ ID NO: 244
  REGION 1..110: note = Description of Artificial Sequence: Synthetic light chain variable domain

SEQ ID NO: 6727 - protein, 109 aa, synthetic construct; identical to SEQ ID NO: 245
  REGION 1..109: note = Description of Artificial Sequence: Synthetic light chain variable domain

SEQ ID NO: 6728 - protein, 108 aa, synthetic construct; identical to SEQ ID NO: 246
  REGION 1..108: note = Description of Artificial Sequence: Synthetic light chain variable domain

SEQ ID NO: 6729 - protein, 107 aa, synthetic construct; identical to SEQ ID NO: 247
  REGION 1..107: note = Description of Artificial Sequence: Synthetic light chain variable domain

SEQ ID NO: 6730 - protein, 109 aa, synthetic construct; identical to SEQ ID NO: 248
  REGION 1..109: note = Description of Artificial Sequence: Synthetic light chain variable domain

SEQ ID NO: 6731 - protein, 109 aa, synthetic construct; identical to SEQ ID NO: 249
  REGION 1..109: note = Description of Artificial Sequence: Synthetic light chain variable domain

SEQ ID NO: 6732 - protein, 111 aa, synthetic construct; identical to SEQ ID NO: 250
  REGION 1..111: note = Description of Artificial Sequence: Synthetic light chain variable domain

SEQ ID NO: 6733 - protein, 109 aa, synthetic construct; identical to SEQ ID NO: 251
  REGION 1..109: note = Description of Artificial Sequence: Synthetic light chain variable domain
  MOD_RES 5..6: note = Any amino acid
  MOD_RES 8..9: note = Any amino acid
  MOD_RES 93: note = Any amino acid
  MOD_RES 104: note = Any amino acid

SEQ ID NO: 6734 - protein, 112 aa, synthetic construct; identical to SEQ ID NO: 252
  REGION 1..112: note = Description of Artificial Sequence: Synthetic light chain variable domain
  MOD_RES 61: note = Any amino acid

SEQ ID NO: 6735 - protein, 112 aa, synthetic construct; identical to SEQ ID NO: 253
  REGION 1..112: note = Description of Artificial Sequence: Synthetic light chain variable domain

SEQ ID NO: 6736 - protein, 110 aa, synthetic construct; identical to SEQ ID NO: 254
  REGION 1..110: note = Description of Artificial Sequence: Synthetic light chain variable domain

SEQ ID NO: 6737 - protein, 112 aa, synthetic construct; identical to SEQ ID NO: 255
  REGION 1..112: note = Description of Artificial Sequence: Synthetic light chain variable domain

SEQ ID NO: 6738 - protein, 111 aa, synthetic construct; identical to SEQ ID NO: 256
  REGION 1..111: note = Description of Artificial Sequence: Synthetic light chain variable domain

SEQ ID NO: 6739 - protein, 111 aa, synthetic construct; identical to SEQ ID NO: 257
  REGION 1..111: note = Description of Artificial Sequence: Synthetic light chain variable domain

SEQ ID NO: 6740 - protein, 106 aa, synthetic construct; identical to SEQ ID NO: 258
  REGION 1..106: note = Description of Artificial Sequence: Synthetic light chain variable domain

SEQ ID NO: 6741 - protein, 99 aa, synthetic construct; identical to SEQ ID NO: 259
  REGION 1..99: note = Description of Artificial Sequence: Synthetic light chain variable domain

SEQ ID NO: 6742 - protein, 110 aa, synthetic construct; identical to SEQ ID NO: 260
  REGION 1..110: note = Description of Artificial Sequence: Synthetic light chain variable domain

SEQ ID NO: 6743 - protein, 111 aa, synthetic construct; identical to SEQ ID NO: 261
  REGION 1..111: note = Description of Artificial Sequence: Synthetic light chain variable domain

SEQ ID NO: 6744 - protein, 124 aa, synthetic construct; identical to SEQ ID NO: 262
  REGION 1..124: note = Description of Artificial Sequence: Synthetic light chain variable domain

SEQ ID NO: 6745 - protein, 239 aa, synthetic construct; identical to SEQ ID NO: 263
  REGION 1..239: note = Description of Artificial Sequence: Synthetic light chain variable domain

SEQ ID NO: 6746 - protein, 111 aa, synthetic construct; identical to SEQ ID NO: 264
  REGION 1..111: note = Description of Artificial Sequence: Synthetic light chain variable domain

SEQ ID NO: 6747 - protein, 110 aa, synthetic construct; identical to SEQ ID NO: 265
  REGION 1..110: note = Description of Artificial Sequence: Synthetic light chain variable domain

SEQ ID NO: 6748 - protein, 111 aa, synthetic construct; identical to SEQ ID NO: 266
  REGION 1..111: note = Description of Artificial Sequence: Synthetic light chain variable domain

SEQ ID NO: 6749 - protein, 109 aa, synthetic construct; identical to SEQ ID NO: 270
  REGION 1..109: note = Description of Artificial Sequence: Synthetic light chain variable domain

SEQ ID NO: 6750 - protein, 111 aa, synthetic construct; identical to SEQ ID NO: 271
  REGION 1..111: note = Description of Artificial Sequence: Synthetic light chain variable domain

SEQ ID NO: 6751 - protein, 121 aa, synthetic construct; identical to SEQ ID NO: 272
  REGION 1..121: note = Description of Artificial Sequence: Synthetic light chain variable domain

SEQ ID NO: 6752 - protein, 263 aa, synthetic construct; identical to SEQ ID NO: 273
  REGION 1..263: note = Description of Artificial Sequence: Synthetic single chain variable fragment

SEQ ID NO: 6753 - protein, 247 aa, synthetic construct; identical to SEQ ID NO: 274
  REGION 1..247: note = Description of Artificial Sequence: Synthetic single chain variable fragment

SEQ ID NO: 6754 - protein, 242 aa, synthetic construct; identical to SEQ ID NO: 275
  REGION 1..242: note = Description of Artificial Sequence: Synthetic single chain variable fragment

SEQ ID NO: 6755 - protein, 247 aa, synthetic construct; identical to SEQ ID NO: 276
  REGION 1..247: note = Description of Artificial Sequence: Synthetic single chain variable fragment

SEQ ID NO: 6756 - protein, 248 aa, synthetic construct; identical to SEQ ID NO: 277
  REGION 1..248: note = Description of Artificial Sequence: Synthetic single chain variable fragment

SEQ ID NO: 6757 - protein, 242 aa, synthetic construct; identical to SEQ ID NO: 278
  REGION 1..242: note = Description of Artificial Sequence: Synthetic single chain variable fragment

SEQ ID NO: 6758 - protein, 242 aa, synthetic construct; identical to SEQ ID NO: 279
  REGION 1..242: note = Description of Artificial Sequence: Synthetic single chain variable fragment

SEQ ID NO: 6759 - protein, 242 aa, synthetic construct; identical to SEQ ID NO: 280
  REGION 1..242: note = Description of Artificial Sequence: Synthetic single chain variable fragment

SEQ ID NO: 6760 - protein, 246 aa, synthetic construct; identical to SEQ ID NO: 281
  REGION 1..246: note = Description of Artificial Sequence: Synthetic single chain variable fragment

SEQ ID NO: 6761 - protein, 252 aa, synthetic construct; identical to SEQ ID NO: 282
  REGION 1..252: note = Description of Artificial Sequence: Synthetic single chain variable fragment

SEQ ID NO: 6762 - protein, 249 aa, synthetic construct; identical to SEQ ID NO: 283
  REGION 1..249: note = Description of Artificial Sequence: Synthetic single chain variable fragment

SEQ ID NO: 6763 - protein, 249 aa, synthetic construct; identical to SEQ ID NO: 284
  REGION 1..249: note = Description of Artificial Sequence: Synthetic single chain variable fragment

SEQ ID NO: 6764 - protein, 251 aa, synthetic construct; identical to SEQ ID NO: 285
  REGION 1..251: note = Description of Artificial Sequence: Synthetic single chain variable fragment

SEQ ID NO: 6765 - protein, 252 aa, synthetic construct; identical to SEQ ID NO: 286
  REGION 1..252: note = Description of Artificial Sequence: Synthetic single chain variable fragment

SEQ ID NO: 6766 - protein, 252 aa, synthetic construct; identical to SEQ ID NO: 286
  REGION 1..252: note = Description of Artificial Sequence: Synthetic single chain variable fragment

SEQ ID NO: 6767 - protein, 252 aa, synthetic construct; identical to SEQ ID NO: 288
  REGION 1..252: note = Description of Artificial Sequence: Synthetic single chain variable fragment

SEQ ID NO: 6768 - protein, 252 aa, synthetic construct; identical to SEQ ID NO: 288
  REGION 1..252: note = Description of Artificial Sequence: Synthetic single chain variable fragment

SEQ ID NO: 6769 - protein, 252 aa, synthetic construct; identical to SEQ ID NO: 288
  REGION 1..252: note = Description of Artificial Sequence: Synthetic single chain variable fragment

SEQ ID NO: 6770 - protein, 252 aa, synthetic construct; identical to SEQ ID NO: 291
  REGION 1..252: note = Description of Artificial Sequence: Synthetic single chain variable fragment
  MOD_RES 76: note = Any amino acid
  MOD_RES 201: note = Any amino acid

SEQ ID NO: 6771 - protein, 252 aa, synthetic construct; identical to SEQ ID NO: 286
  REGION 1..252: note = Description of Artificial Sequence: Synthetic single chain variable fragment

SEQ ID NO: 6772 - protein, 250 aa, synthetic construct; identical to SEQ ID NO: 293
  REGION 1..250: note = Description of Artificial Sequence: Synthetic single chain variable fragment

SEQ ID NO: 6773 - protein, 252 aa, synthetic construct; identical to SEQ ID NO: 294
  REGION 1..252: note = Description of Artificial Sequence: Synthetic single chain variable fragment

SEQ ID NO: 6774 - protein, 236 aa, synthetic construct; identical to SEQ ID NO: 295
  REGION 1..236: note = Description of Artificial Sequence: Synthetic single chain variable fragment

SEQ ID NO: 6775 - protein, 251 aa, synthetic construct; identical to SEQ ID NO: 296
  REGION 1..251: note = Description of Artificial Sequence: Synthetic single chain variable fragment

SEQ ID NO: 6776 - protein, 246 aa, synthetic construct; identical to SEQ ID NO: 297
  REGION 1..246: note = Description of Artificial Sequence: Synthetic single chain variable fragment

SEQ ID NO: 6777 - protein, 239 aa, synthetic construct; identical to SEQ ID NO: 298
  REGION 1..239: note = Description of Artificial Sequence: Synthetic single chain variable fragment

SEQ ID NO: 6778 - protein, 250 aa, synthetic construct; identical to SEQ ID NO: 299
  REGION 1..250: note = Description of Artificial Sequence: Synthetic single chain variable fragment

SEQ ID NO: 6779 - protein, 251 aa, synthetic construct; identical to SEQ ID NO: 300
  REGION 1..251: note = Description of Artificial Sequence: Synthetic single chain variable fragment

SEQ ID NO: 6780 - protein, 242 aa, synthetic construct; identical to SEQ ID NO: 301
  REGION 1..242: note = Description of Artificial Sequence: Synthetic single chain variable fragment

SEQ ID NO: 6781 - protein, 242 aa, synthetic construct; identical to SEQ ID NO: 302
  REGION 1..242: note = Description of Artificial Sequence: Synthetic single chain variable fragment

SEQ ID NO: 6782 - protein, 246 aa, synthetic construct; identical to SEQ ID NO: 303
  REGION 1..246: note = Description of Artificial Sequence: Synthetic single chain variable fragment

SEQ ID NO: 6783 - protein, 249 aa, synthetic construct; identical to SEQ ID NO: 304
  REGION 1..249: note = Description of Artificial Sequence: Synthetic single chain variable fragment

SEQ ID NO: 6784 - protein, 249 aa, synthetic construct; identical to SEQ ID NO: 305
  REGION 1..249: note = Description of Artificial Sequence: Synthetic single chain variable fragment

SEQ ID NO: 6785 - protein, 252 aa, synthetic construct; identical to SEQ ID NO: 288
  REGION 1..252: note = Description of Artificial Sequence: Synthetic single chain variable fragment

SEQ ID NO: 6786 - protein, 495 aa, synthetic construct; identical to SEQ ID NO: 307
  REGION 1..495: note = Description of Artificial Sequence: Synthetic single chain variable fragment

SEQ ID NO: 6787 - protein, 247 aa, synthetic construct; identical to SEQ ID NO: 308
  REGION 1..247: note = Description of Artificial Sequence: Synthetic single chain variable fragment

SEQ ID NO: 6788 - protein, 251 aa, synthetic construct; identical to SEQ ID NO: 309
  REGION 1..251: note = Description of Artificial Sequence: Synthetic single chain variable fragment

SEQ ID NO: 6789 - protein, 250 aa, synthetic construct; identical to SEQ ID NO: 310
  REGION 1..250: note = Description of Artificial Sequence: Synthetic single chain variable fragment

SEQ ID NO: 6790 - protein, 247 aa, synthetic construct; identical to SEQ ID NO: 311
  REGION 1..247: note = Description of Artificial Sequence: Synthetic single chain variable fragment

SEQ ID NO: 6791 - protein, 248 aa, synthetic construct; identical to SEQ ID NO: 312
  REGION 1..248: note = Description of Artificial Sequence: Synthetic single chain variable fragment

SEQ ID NO: 6792 - protein, 242 aa, synthetic construct; identical to SEQ ID NO: 313
  REGION 1..242: note = Description of Artificial Sequence: Synthetic single chain variable fragment

SEQ ID NO: 6793 - protein, 251 aa, synthetic construct; identical to SEQ ID NO: 314
  REGION 1..251: note = Description of Artificial Sequence: Synthetic single chain variable fragment

SEQ ID NO: 6794 - protein, 247 aa, synthetic construct; identical to SEQ ID NO: 315
  REGION 1..247: note = Description of Artificial Sequence: Synthetic single chain variable fragment

SEQ ID NO: 6795 - protein, 250 aa, synthetic construct; identical to SEQ ID NO: 316
  REGION 1..250: note = Description of Artificial Sequence: Synthetic single chain variable fragment

SEQ ID NO: 6796 - protein, 252 aa, synthetic construct; identical to SEQ ID NO: 317
  REGION 1..252: note = Description of Artificial Sequence: Synthetic single chain variable fragment

SEQ ID NO: 6797 - protein, 247 aa, synthetic construct; identical to SEQ ID NO: 318
  REGION 1..247: note = Description of Artificial Sequence: Synthetic single chain variable fragment

SEQ ID NO: 6798 - protein, 247 aa, synthetic construct; identical to SEQ ID NO: 319
  REGION 1..247: note = Description of Artificial Sequence: Synthetic single chain variable fragment

SEQ ID NO: 6799 - protein, 249 aa, synthetic construct; identical to SEQ ID NO: 320
  REGION 1..249: note = Description of Artificial Sequence: Synthetic single chain variable fragment

SEQ ID NO: 6800 - protein, 251 aa, synthetic construct; identical to SEQ ID NO: 321
  REGION 1..251: note = Description of Artificial Sequence: Synthetic single chain variable fragment

SEQ ID NO: 6801 - protein, 247 aa, synthetic construct; identical to SEQ ID NO: 322
  REGION 1..247: note = Description of Artificial Sequence: Synthetic single chain variable fragment

SEQ ID NO: 6802 - protein, 241 aa, synthetic construct; identical to SEQ ID NO: 323
  REGION 1..241: note = Description of Artificial Sequence: Synthetic single chain variable fragment

SEQ ID NO: 6803 - protein, 248 aa, synthetic construct; identical to SEQ ID NO: 277
  REGION 1..248: note = Description of Artificial Sequence: Synthetic single chain variable fragment

SEQ ID NO: 6804 - protein, 246 aa, synthetic construct; identical to SEQ ID NO: 281
  REGION 1..246: note = Description of Artificial Sequence: Synthetic single chain variable fragment

SEQ ID NO: 6805 - protein, 252 aa, synthetic construct; identical to SEQ ID NO: 282
  REGION 1..252: note = Description of Artificial Sequence: Synthetic single chain variable fragment

SEQ ID NO: 6806 - protein, 249 aa, synthetic construct; identical to SEQ ID NO: 283
  REGION 1..249: note = Description of Artificial Sequence: Synthetic single chain variable fragment

SEQ ID NO: 6807 - protein, 249 aa, synthetic construct; identical to SEQ ID NO: 284
  REGION 1..249: note = Description of Artificial Sequence: Synthetic single chain variable fragment

SEQ ID NO: 6808 - protein, 251 aa, synthetic construct; identical to SEQ ID NO: 285
  REGION 1..251: note = Description of Artificial Sequence: Synthetic single chain variable fragment

SEQ ID NO: 6809 - protein, 252 aa, synthetic construct; identical to SEQ ID NO: 286
  REGION 1..252: note = Description of Artificial Sequence: Synthetic single chain variable fragment

SEQ ID NO: 6810 - protein, 252 aa, synthetic construct; identical to SEQ ID NO: 286
  REGION 1..252: note = Description of Artificial Sequence: Synthetic single chain variable fragment

SEQ ID NO: 6811 - protein, 249 aa, synthetic construct; identical to SEQ ID NO: 332
  REGION 1..249: note = Description of Artificial Sequence: Synthetic single chain variable fragment
  MOD_RES 64..65: note = Any amino acid
  MOD_RES 68..69: note = Any amino acid
  MOD_RES 93: note = Any amino acid
  MOD_RES 98: note = Any amino acid
  MOD_RES 102: note = Any amino acid
  MOD_RES 104: note = Any amino acid
  MOD_RES 113: note = Any amino acid
  MOD_RES 145..146: note = Any amino acid
  MOD_RES 148..149: note = Any amino acid
  MOD_RES 233: note = Any amino acid
  MOD_RES 244: note = Any amino acid

SEQ ID NO: 6812 - protein, 252 aa, synthetic construct; identical to SEQ ID NO: 288
  REGION 1..252: note = Description of Artificial Sequence: Synthetic single chain variable fragment

SEQ ID NO: 6813 - protein, 252 aa, synthetic construct; identical to SEQ ID NO: 288
  REGION 1..252: note = Description of Artificial Sequence: Synthetic single chain variable fragment

SEQ ID NO: 6814 - protein, 252 aa, synthetic construct; identical to SEQ ID NO: 288
  REGION 1..252: note = Description of Artificial Sequence: Synthetic single chain variable fragment

SEQ ID NO: 6815 - protein, 252 aa, synthetic construct; identical to SEQ ID NO: 291
  REGION 1..252: note = Description of Artificial Sequence: Synthetic single chain variable fragment
  MOD_RES 76: note = Any amino acid
  MOD_RES 201: note = Any amino acid

SEQ ID NO: 6816 - protein, 252 aa, synthetic construct; identical to SEQ ID NO: 286
  REGION 1..252: note = Description of Artificial Sequence: Synthetic single chain variable fragment

SEQ ID NO: 6817 - protein, 250 aa, synthetic construct; identical to SEQ ID NO: 293
  REGION 1..250: note = Description of Artificial Sequence: Synthetic single chain variable fragment

SEQ ID NO: 6818 - protein, 252 aa, synthetic construct; identical to SEQ ID NO: 294
  REGION 1..252: note = Description of Artificial Sequence: Synthetic single chain variable fragment

SEQ ID NO: 6819 - protein, 236 aa, synthetic construct; identical to SEQ ID NO: 295
  REGION 1..236: note = Description of Artificial Sequence: Synthetic single chain variable fragment

SEQ ID NO: 6820 - protein, 251 aa, synthetic construct; identical to SEQ ID NO: 296
  REGION 1..251: note = Description of Artificial Sequence: Synthetic single chain variable fragment

SEQ ID NO: 6821 - protein, 246 aa, synthetic construct; identical to SEQ ID NO: 297
  REGION 1..246: note = Description of Artificial Sequence: Synthetic single chain variable fragment

SEQ ID NO: 6822 - protein, 239 aa, synthetic construct; identical to SEQ ID NO: 298
  REGION 1..239: note = Description of Artificial Sequence: Synthetic single chain variable fragment

SEQ ID NO: 6823 - protein, 250 aa, synthetic construct; identical to SEQ ID NO: 299
  REGION 1..250: note = Description of Artificial Sequence: Synthetic single chain variable fragment

SEQ ID NO: 6824 - protein, 251 aa, synthetic construct; identical to SEQ ID NO: 300
  REGION 1..251: note = Description of Artificial Sequence: Synthetic single chain variable fragment

SEQ ID NO: 6825 - protein, 273 aa, synthetic construct; identical to SEQ ID NO: 346
  REGION 1..273: note = Description of Artificial Sequence: Synthetic single chain variable fragment

SEQ ID NO: 6826 - protein, 270 aa, synthetic construct; identical to SEQ ID NO: 347
  REGION 1..270: note = Description of Artificial Sequence: Synthetic single chain variable fragment

SEQ ID NO: 6827 - protein, 277 aa, synthetic construct; identical to SEQ ID NO: 348
  REGION 1..277: note = Description of Artificial Sequence: Synthetic single chain variable fragment

SEQ ID NO: 6828 - protein, 246 aa, synthetic construct; identical to SEQ ID NO: 303
  REGION 1..246: note = Description of Artificial Sequence: Synthetic single chain variable fragment

SEQ ID NO: 6829 - protein, 249 aa, synthetic construct; identical to SEQ ID NO: 304
  REGION 1..249: note = Description of Artificial Sequence: Synthetic single chain variable fragment

SEQ ID NO: 6830 - protein, 249 aa, synthetic construct; identical to SEQ ID NO: 305
  REGION 1..249: note = Description of Artificial Sequence: Synthetic single chain variable fragment

SEQ ID NO: 6831 - protein, 252 aa, synthetic construct; identical to SEQ ID NO: 288
  REGION 1..252: note = Description of Artificial Sequence: Synthetic single chain variable fragment

SEQ ID NO: 6832 - protein, 251 aa, synthetic construct; identical to SEQ ID NO: 309
  REGION 1..251: note = Description of Artificial Sequence: Synthetic single chain variable fragment

SEQ ID NO: 6833 - protein, 250 aa, synthetic construct; identical to SEQ ID NO: 310
  REGION 1..250: note = Description of Artificial Sequence: Synthetic single chain variable fragment

SEQ ID NO: 6834 - protein, 247 aa, synthetic construct; identical to SEQ ID NO: 311
  REGION 1..247: note = Description of Artificial Sequence: Synthetic single chain variable fragment

SEQ ID NO: 6835 - protein, 248 aa, synthetic construct; identical to SEQ ID NO: 312
  REGION 1..248: note = Description of Artificial Sequence: Synthetic single chain variable fragment

SEQ ID NO: 6836 - protein, 251 aa, synthetic construct; identical to SEQ ID NO: 314
  REGION 1..251: note = Description of Artificial Sequence: Synthetic single chain variable fragment

SEQ ID NO: 6837 - protein, 250 aa, synthetic construct; identical to SEQ ID NO: 316
  REGION 1..250: note = Description of Artificial Sequence: Synthetic single chain variable fragment

SEQ ID NO: 6838 - protein, 249 aa, synthetic construct; identical to SEQ ID NO: 320
  REGION 1..249: note = Description of Artificial Sequence: Synthetic single chain variable fragment

SEQ ID NO: 6839 - protein, 251 aa, synthetic construct; identical to SEQ ID NO: 321
  REGION 1..251: note = Description of Artificial Sequence: Synthetic single chain variable fragment

SEQ ID NO: 6840 - protein, 249 aa, synthetic construct; identical to SEQ ID NO: 284
  REGION 1..249: note = Description of Artificial Sequence: Synthetic single chain variable fragment

SEQ ID NO: 6841 - protein, 242 aa, synthetic construct; identical to SEQ ID NO: 275
  REGION 1..242: note = Description of Artificial Sequence: Synthetic single chain variable fragment

SEQ ID NO: 6842 - protein, 245 aa, synthetic construct; identical to SEQ ID NO: 363
  REGION 1..245: note = Description of Artificial Sequence: Synthetic single chain variable fragment

SEQ ID NO: 6843 - protein, 119 aa, synthetic construct; identical to SEQ ID NO: 364
  REGION 1..119: note = Description of Artificial Sequence: Synthetic single chain variable fragment

SEQ ID NO: 6844 - protein, 438 aa, synthetic construct; identical to SEQ ID NO: 365
  REGION 1..438: note = Description of Artificial Sequence: Synthetic single chain variable fragment

SEQ ID NO: 6845 - protein, 272 aa, synthetic construct; identical to SEQ ID NO: 366
  REGION 1..272: note = Description of Artificial Sequence: Synthetic single chain variable fragment

SEQ ID NO: 6846 - protein, 267 aa, synthetic construct; identical to SEQ ID NO: 367
  REGION 1..267: note = Description of Artificial Sequence: Synthetic single chain variable fragment

SEQ ID NO: 6847 - protein, 270 aa, synthetic construct; identical to SEQ ID NO: 347
  REGION 1..270: note = Description of Artificial Sequence: Synthetic single chain variable fragment

SEQ ID NO: 6848 - protein, 277 aa, synthetic construct; identical to SEQ ID NO: 348
  REGION 1..277: note = Description of Artificial Sequence: Synthetic single chain variable fragment

SEQ ID NO: 6849 - protein, 242 aa, synthetic construct; identical to SEQ ID NO: 280
  REGION 1..242: note = Description of Artificial Sequence: Synthetic single chain variable fragment

SEQ ID NO: 6850 - protein, 242 aa, synthetic construct; identical to SEQ ID NO: 301
  REGION 1..242: note = Description of Artificial Sequence: Synthetic single chain variable fragment

SEQ ID NO: 6851 - protein, 242 aa, synthetic construct; identical to SEQ ID NO: 302
  REGION 1..242: note = Description of Artificial Sequence: Synthetic single chain variable fragment

SEQ ID NO: 6852 - protein, 247 aa, synthetic construct; identical to SEQ ID NO: 308
  REGION 1..247: note = Description of Artificial Sequence: Synthetic single chain variable fragment

SEQ ID NO: 6853 - protein, 247 aa, synthetic construct; identical to SEQ ID NO: 315
  REGION 1..247: note = Description of Artificial Sequence: Synthetic single chain variable fragment

SEQ ID NO: 6854 - protein, 247 aa, synthetic construct; identical to SEQ ID NO: 318
  REGION 1..247: note = Description of Artificial Sequence: Synthetic single chain variable fragment

SEQ ID NO: 6855 - protein, 247 aa, synthetic construct; identical to SEQ ID NO: 319
  REGION 1..247: note = Description of Artificial Sequence: Synthetic single chain variable fragment

SEQ ID NO: 6856 - protein, 247 aa, synthetic construct; identical to SEQ ID NO: 322
  REGION 1..247: note = Description of Artificial Sequence: Synthetic single chain variable fragment

SEQ ID NO: 6857 - protein, 247 aa, synthetic construct; identical to SEQ ID NO: 276
  REGION 1..247: note = Description of Artificial Sequence: Synthetic single chain variable fragment

SEQ ID NO: 6858 - protein, 242 aa, synthetic construct; identical to SEQ ID NO: 278
  REGION 1..242: note = Description of Artificial Sequence: Synthetic single chain variable fragment

SEQ ID NO: 6859 - protein, 495 aa, synthetic construct; identical to SEQ ID NO: 307
  REGION 1..495: note = Description of Artificial Sequence: Synthetic single chain variable fragment

SEQ ID NO: 6860 - protein, 242 aa, synthetic construct; identical to SEQ ID NO: 279
  REGION 1..242: note = Description of Artificial Sequence: Synthetic single chain variable fragment

SEQ ID NO: 6861 - protein, 242 aa, synthetic construct; identical to SEQ ID NO: 313
  REGION 1..242: note = Description of Artificial Sequence: Synthetic single chain variable fragment

SEQ ID NO: 6862 - protein, 252 aa, synthetic construct; identical to SEQ ID NO: 317
  REGION 1..252: note = Description of Artificial Sequence: Synthetic single chain variable fragment

SEQ ID NO: 6863 - protein, 250 aa, synthetic construct; identical to SEQ ID NO: 384
  REGION 1..250: note = Description of Artificial Sequence: Synthetic single chain variable fragment

SEQ ID NO: 6864 - protein, 242 aa, synthetic construct; identical to SEQ ID NO: 313
  REGION 1..242: note = Description of Artificial Sequence: Synthetic single chain variable fragment

SEQ ID NO: 6865 - protein, 251 aa, synthetic construct; identical to SEQ ID NO: 386
  REGION 1..251: note = Description of Artificial Sequence: Synthetic single chain variable fragment

SEQ ID NO: 6866 - protein, 271 aa, synthetic construct; identical to SEQ ID NO: 387
  REGION 1..271: note = Description of Artificial Sequence: Synthetic single chain variable fragment

SEQ ID NO: 6867 - protein, 248 aa, synthetic construct; identical to SEQ ID NO: 277
  REGION 1..248: note = Description of Artificial Sequence: Synthetic single chain variable fragment

SEQ ID NO: 6868 - protein, 246 aa, synthetic construct; identical to SEQ ID NO: 281
  REGION 1..246: note = Description of Artificial Sequence: Synthetic single chain variable fragment

SEQ ID NO: 6869 - protein, 252 aa, synthetic construct; identical to SEQ ID NO: 282
  REGION 1..252: note = Description of Artificial Sequence: Synthetic single chain variable fragment

SEQ ID NO: 6870 - protein, 249 aa, synthetic construct; identical to SEQ ID NO: 283
  REGION 1..249: note = Description of Artificial Sequence: Synthetic single chain variable fragment

SEQ ID NO: 6871 - protein, 251 aa, synthetic construct; identical to SEQ ID NO: 285
  REGION 1..251: note = Description of Artificial Sequence: Synthetic single chain variable fragment

SEQ ID NO: 6872 - protein, 252 aa, synthetic construct; identical to SEQ ID NO: 286
  REGION 1..252: note = Description of Artificial Sequence: Synthetic single chain variable fragment

SEQ ID NO: 6873 - protein, 249 aa, synthetic construct; identical to SEQ ID NO: 332
  REGION 1..249: note = Description of Artificial Sequence: Synthetic single chain variable fragment
  MOD_RES 64..65: note = Any amino acid
  MOD_RES 68..69: note = Any amino acid
  MOD_RES 93: note = Any amino acid
  MOD_RES 98: note = Any amino acid
  MOD_RES 102: note = Any amino acid
  MOD_RES 104: note = Any amino acid
  MOD_RES 113: note = Any amino acid
  MOD_RES 145..146: note = Any amino acid
  MOD_RES 148..149: note = Any amino acid
  MOD_RES 233: note = Any amino acid
  MOD_RES 244: note = Any amino acid

SEQ ID NO: 6874 - protein, 252 aa, synthetic construct; identical to SEQ ID NO: 291
  REGION 1..252: note = Description of Artificial Sequence: Synthetic single chain variable fragment
  MOD_RES 76: note = Any amino acid
  MOD_RES 201: note = Any amino acid

SEQ ID NO: 6875 - protein, 250 aa, synthetic construct; identical to SEQ ID NO: 293
  REGION 1..250: note = Description of Artificial Sequence: Synthetic single chain variable fragment

SEQ ID NO: 6876 - protein, 252 aa, synthetic construct; identical to SEQ ID NO: 294
  REGION 1..252: note = Description of Artificial Sequence: Synthetic single chain variable fragment

SEQ ID NO: 6877 - protein, 236 aa, synthetic construct; identical to SEQ ID NO: 295
  REGION 1..236: note = Description of Artificial Sequence: Synthetic single chain variable fragment

SEQ ID NO: 6878 - protein, 251 aa, synthetic construct; identical to SEQ ID NO: 296
  REGION 1..251: note = Description of Artificial Sequence: Synthetic single chain variable fragment

SEQ ID NO: 6879 - protein, 246 aa, synthetic construct; identical to SEQ ID NO: 297
  REGION 1..246: note = Description of Artificial Sequence: Synthetic single chain variable fragment

SEQ ID NO: 6880 - protein, 239 aa, synthetic construct; identical to SEQ ID NO: 298
  REGION 1..239: note = Description of Artificial Sequence: Synthetic single chain variable fragment

SEQ ID NO: 6881 - protein, 250 aa, synthetic construct; identical to SEQ ID NO: 299
  REGION 1..250: note = Description of Artificial Sequence: Synthetic single chain variable fragment

SEQ ID NO: 6882 - protein, 251 aa, synthetic construct; identical to SEQ ID NO: 300
  REGION 1..251: note = Description of Artificial Sequence: Synthetic single chain variable fragment

SEQ ID NO: 6883 - protein, 246 aa, synthetic construct; identical to SEQ ID NO: 303
  REGION 1..246: note = Description of Artificial Sequence: Synthetic single chain variable fragment

SEQ ID NO: 6884 - protein, 249 aa, synthetic construct; identical to SEQ ID NO: 304
  REGION 1..249: note = Description of Artificial Sequence: Synthetic single chain variable fragment

SEQ ID NO: 6885 - protein, 249 aa, synthetic construct; identical to SEQ ID NO: 305
  REGION 1..249: note = Description of Artificial Sequence: Synthetic single chain variable fragment

SEQ ID NO: 6886 - protein, 252 aa, synthetic construct; identical to SEQ ID NO: 288
  REGION 1..252: note = Description of Artificial Sequence: Synthetic single chain variable fragment

SEQ ID NO: 6887 - protein, 251 aa, synthetic construct; identical to SEQ ID NO: 309
  REGION 1..251: note = Description of Artificial Sequence: Synthetic single chain variable fragment

SEQ ID NO: 6888 - protein, 250 aa, synthetic construct; identical to SEQ ID NO: 310
  REGION 1..250: note = Description of Artificial Sequence: Synthetic single chain variable fragment

SEQ ID NO: 6889 - protein, 247 aa, synthetic construct; identical to SEQ ID NO: 311
  REGION 1..247: note = Description of Artificial Sequence: Synthetic single chain variable fragment

SEQ ID NO: 6890 - protein, 248 aa, synthetic construct; identical to SEQ ID NO: 312
  REGION 1..248: note = Description of Artificial Sequence: Synthetic single chain variable fragment

SEQ ID NO: 6891 - protein, 251 aa, synthetic construct; identical to SEQ ID NO: 314
  REGION 1..251: note = Description of Artificial Sequence: Synthetic single chain variable fragment

SEQ ID NO: 6892 - protein, 250 aa, synthetic construct; identical to SEQ ID NO: 316
  REGION 1..250: note = Description of Artificial Sequence: Synthetic single chain variable fragment

SEQ ID NO: 6893 - protein, 249 aa, synthetic construct; identical to SEQ ID NO: 320
  REGION 1..249: note = Description of Artificial Sequence: Synthetic single chain variable fragment

SEQ ID NO: 6894 - protein, 251 aa, synthetic construct; identical to SEQ ID NO: 321
  REGION 1..251: note = Description of Artificial Sequence: Synthetic single chain variable fragment

SEQ ID NO: 6895 - protein, 249 aa, synthetic construct; identical to SEQ ID NO: 284
  REGION 1..249: note = Description of Artificial Sequence: Synthetic single chain variable fragment

SEQ ID NO: 6896 - protein, 277 aa, synthetic construct; identical to SEQ ID NO: 417
  REGION 1..277: note = Description of Artificial Sequence: Synthetic single chain variable fragment

SEQ ID NO: 6897 - protein, 242 aa, synthetic construct; identical to SEQ ID NO: 313
  REGION 1..242: note = Description of Artificial Sequence: Synthetic CD19 scFv

SEQ ID NO: 6898 - protein, 112 aa, Homo sapiens; identical to SEQ ID NO: 419

SEQ ID NO: 6899 - protein, 69 aa, Homo sapiens; identical to SEQ ID NO: 607

SEQ ID NO: 6900 - protein, 120 aa, Homo sapiens; identical to SEQ ID NO: 421

SEQ ID NO: 6901 - protein, 49 aa, Homo sapiens; identical to SEQ ID NO: 422

SEQ ID NO: 6902 - protein, 110 aa, Homo sapiens; identical to SEQ ID NO: 423

SEQ ID NO: 6903 - protein, 114 aa, Homo sapiens; identical to SEQ ID NO: 424

SEQ ID NO: 6904 - protein, 27 aa, Homo sapiens
FWVLVVVGGVLACYSLLVTVAFIIFWV

SEQ ID NO: 6905 - protein, 42 aa, Homo sapiens; identical to SEQ ID NO: 426

SEQ ID NO: 6906 - protein, 44 aa, Homo sapiens; identical to SEQ ID NO: 427

SEQ ID NO: 6907 - protein, 41 aa, Homo sapiens; identical to SEQ ID NO: 428

SEQ ID NO: 6908 - protein, 43 aa, Homo sapiens; identical to SEQ ID NO: 429

SEQ ID NO: 6909 - protein, 220 aa, Homo sapiens; identical to SEQ ID NO: 430

SEQ ID NO: 6910 - protein, 187 aa, Homo sapiens; identical to SEQ ID NO: 431

SEQ ID NO: 6911 - protein, 187 aa, Homo sapiens; identical to SEQ ID NO: 431

SEQ ID NO: 6912 - protein, 54 aa, Homo sapiens; identical to SEQ ID NO: 433

SEQ ID NO: 6913 - protein, 60 aa, Homo sapiens; identical to SEQ ID NO: 434

SEQ ID NO: 6914 - protein, 35 aa, Homo sapiens; identical to SEQ ID NO: 435

SEQ ID NO: 6915 - protein, 38 aa, Homo sapiens; identical to SEQ ID NO: 436

SEQ ID NO: 6916 - protein, 54 aa, Homo sapiens; identical to SEQ ID NO: 437

SEQ ID NO: 6917 - protein, 42 aa, Homo sapiens; identical to SEQ ID NO: 438

SEQ ID NO: 6918 - protein, 37 aa, Homo sapiens; identical to SEQ ID NO: 439

SEQ ID NO: 6919 - protein, 42 aa, Homo sapiens; identical to SEQ ID NO: 440

SEQ ID NO: 6920 - protein, 42 aa, Homo sapiens; identical to SEQ ID NO: 441

SEQ ID NO: 6921 - protein, 225 aa, Homo sapiens; identical to SEQ ID NO: 442

SEQ ID NO: 6922 - protein, 154 aa, Homo sapiens; identical to SEQ ID NO: 443

SEQ ID NO: 6923 - protein, 194 aa, Homo sapiens; identical to SEQ ID NO: 444

SEQ ID NO: 6924 - protein, 47 aa, Homo sapiens; identical to SEQ ID NO: 445

SEQ ID NO: 6925 - protein, 341 aa, Homo sapiens; identical to SEQ ID NO: 446

SEQ ID NO: 6926 - protein, 48 aa, Homo sapiens; identical to SEQ ID NO: 447

SEQ ID NO: 6927 - protein, 6 aa, Homo sapiens
FAAYRS

SEQ ID NO: 6928 - protein, 68 aa, Homo sapiens; identical to SEQ ID NO: 449

SEQ ID NO: 6929 - protein, 41 aa, Homo sapiens; identical to SEQ ID NO: 450

SEQ ID NO: 6930 - protein, 40 aa, Homo sapiens; identical to SEQ ID NO: 451

SEQ ID NO: 6931 - protein, 106 aa, Homo sapiens; identical to SEQ ID NO: 452

SEQ ID NO: 6932 - protein, 200 aa, Homo sapiens; identical to SEQ ID NO: 453

SEQ ID NO: 6933 - protein, 222 aa, Homo sapiens; identical to SEQ ID NO: 454

SEQ ID NO: 6934 - protein, 188 aa, Homo sapiens; identical to SEQ ID NO: 455

SEQ ID NO: 6935 - protein, 70 aa, Homo sapiens; identical to SEQ ID NO: 456

SEQ ID NO: 6936 - protein, 108 aa, Homo sapiens; identical to SEQ ID NO: 457

SEQ ID NO: 6937 - protein, 153 aa, Homo sapiens; identical to SEQ ID NO: 458

SEQ ID NO: 6938 - protein, 151 aa, Homo sapiens; identical to SEQ ID NO: 459

SEQ ID NO: 6939 - protein, 171 aa, Homo sapiens; identical to SEQ ID NO: 460

SEQ ID NO: 6940 - protein, 127 aa, Homo sapiens; identical to SEQ ID NO: 461

SEQ ID NO: 6941 - protein, 21 aa, Homo sapiens
DQVYQPLRDRDDAQYSHLGGN

SEQ ID NO: 6942 - protein, 171 aa, Homo sapiens; identical to SEQ ID NO: 460

SEQ ID NO: 6943 - protein, 127 aa, Homo sapiens; identical to SEQ ID NO: 461

SEQ ID NO: 6944 - protein, 21 aa, Homo sapiens
DQVYQPLRDRDDAQYSHLGGN

SEQ ID NO: 6945 - protein, 207 aa, Homo sapiens; identical to SEQ ID NO: 466

SEQ ID NO: 6946 - protein, 21 aa, Homo sapiens
NPDYEPIRKGQRDLYSGLNQR

SEQ ID NO: 6947 - protein, 182 aa, Homo sapiens; identical to SEQ ID NO: 468

SEQ ID NO: 6948 - protein, 21 aa, Homo sapiens
DQLYQPLKDREDDQYSHLQGN

SEQ ID NO: 6949 - protein, 21 aa, Homo sapiens
DQLYQPLKDREDDQYSHLQGN

SEQ ID NO: 6950 - protein, 182 aa, Homo sapiens; identical to SEQ ID NO: 468

SEQ ID NO: 6951 - protein, 163 aa, Homo sapiens; identical to SEQ ID NO: 472

SEQ ID NO: 6952 - protein, 164 aa, Homo sapiens; identical to SEQ ID NO: 473

SEQ ID NO: 6953 - protein, 164 aa, Homo sapiens; identical to SEQ ID NO: 473

SEQ ID NO: 6954 - protein, 21 aa, Homo sapiens
NQLYNELNLGRREEYDVLDKR

SEQ ID NO: 6955 - protein, 112 aa, Homo sapiens; identical to SEQ ID NO: 476

SEQ ID NO: 6956 - protein, 21 aa, Homo sapiens
DGLYQGLSTATKDTYDALHMQ

SEQ ID NO: 6957 - protein, 112 aa, Homo sapiens; identical to SEQ ID NO: 478

SEQ ID NO: 6958 - protein, 113 aa, Homo sapiens; identical to SEQ ID NO: 479

SEQ ID NO: 6959 - protein, 114 aa, Homo sapiens; identical to SEQ ID NO: 480

SEQ ID NO: 6960 - protein, 98 aa, Homo sapiens; identical to SEQ ID NO: 481

SEQ ID NO: 6961 - protein, 112 aa, Homo sapiens; identical to SEQ ID NO: 482

SEQ ID NO: 6962 - protein, 173 aa, Homo sapiens; identical to SEQ ID NO: 483

SEQ ID NO: 6963 - protein, 113 aa, Homo sapiens; identical to SEQ ID NO: 484

SEQ ID NO: 6964 - protein, 60 aa, Homo sapiens; identical to SEQ ID NO: 485

SEQ ID NO: 6965 - protein, 114 aa, Homo sapiens; identical to SEQ ID NO: 486

SEQ ID NO: 6966 - protein, 113 aa, Homo sapiens; identical to SEQ ID NO: 487

SEQ ID NO: 6967 - protein, 21 aa, Homo sapiens
NQLYNELNLGRREEYDVLDKR

SEQ ID NO: 6968 - protein, 22 aa, Homo sapiens
EGLYNELQKDKMAEAYSEIGMK

SEQ ID NO: 6969 - protein, 21 aa, Homo sapiens
DGLYQGLSTATKDTYDALHMQ

SEQ ID NO: 6970 - protein, 112 aa, Homo sapiens; identical to SEQ ID NO: 476

SEQ ID NO: 6971 - protein, 112 aa, Homo sapiens; identical to SEQ ID NO: 419

SEQ ID NO: 6972 - protein, 110 aa, Homo sapiens; identical to SEQ ID NO: 493

SEQ ID NO: 6973 - protein, 137 aa, Homo sapiens; identical to SEQ ID NO: 494

SEQ ID NO: 6974 - protein, 163 aa, Homo sapiens; identical to SEQ ID NO: 472

SEQ ID NO: 6975 - protein, 38 aa, Homo sapiens; identical to SEQ ID NO: 496

SEQ ID NO: 6976 - protein, 226 aa, Homo sapiens; identical to SEQ ID NO: 497

SEQ ID NO: 6977 - protein, 188 aa, Homo sapiens; identical to SEQ ID NO: 498

SEQ ID NO: 6978 - protein, 226 aa, Homo sapiens; identical to SEQ ID NO: 497

SEQ ID NO: 6979 - protein, 21 aa, Homo sapiens
ENLYEGLNLDDCSMYEDISRG

SEQ ID NO: 6980 - protein, 84 aa, Homo sapiens; identical to SEQ ID NO: 501

SEQ ID NO: 6981 - protein, 84 aa, Homo sapiens; identical to SEQ ID NO: 502

SEQ ID NO: 6982 - protein, 47 aa, Homo sapiens; identical to SEQ ID NO: 503

SEQ ID NO: 6983 - protein, 41 aa, Homo sapiens; identical to SEQ ID NO: 504

SEQ ID NO: 6984 - protein, 47 aa, Homo sapiens; identical to SEQ ID NO: 505

SEQ ID NO: 6985 - protein, 20 aa, Homo sapiens
RPRRSPAQDGKVYINMPGRG

SEQ ID NO: 6986 - protein, 113 aa, Homo sapiens; identical to SEQ ID NO: 507

SEQ ID NO: 6987 - protein, 112 aa, Homo sapiens; identical to SEQ ID NO: 508

SEQ ID NO: 6988 - protein, 102 aa, Homo sapiens; identical to SEQ ID NO: 509

SEQ ID NO: 6989 - protein, 101 aa, Homo sapiens; identical to SEQ ID NO: 510

SEQ ID NO: 6990 - protein, 113 aa, Homo sapiens; identical to SEQ ID NO: 507

SEQ ID NO: 6991 - protein, 112 aa, Homo sapiens; identical to SEQ ID NO: 508

SEQ ID NO: 6992 - protein, 102 aa, Homo sapiens; identical to SEQ ID NO: 509

SEQ ID NO: 6993 - protein, 101 aa, Homo sapiens; identical to SEQ ID NO: 510

SEQ ID NO: 6994 - protein, 21 aa, Homo sapiens
ESPYQELQGQRSDVYSDLNTQ

SEQ ID NO: 6995 - protein, 21 aa, Homo sapiens
ESPYQELQGQRSDVYSDLNTQ

SEQ ID NO: 6996 - protein, 49 aa, Homo sapiens; identical to SEQ ID NO: 517

SEQ ID NO: 6997 - protein, 35 aa, Homo sapiens; identical to SEQ ID NO: 518

SEQ ID NO: 6998 - protein, 39 aa, Homo sapiens; identical to SEQ ID NO: 519

SEQ ID NO: 6999 - protein, 149 aa, Homo sapiens; identical to SEQ ID NO: 520

SEQ ID NO: 7000 - protein, 619 aa, Homo sapiens; identical to SEQ ID NO: 521

SEQ ID NO: 7001 - protein, 180 aa, Homo sapiens; identical to SEQ ID NO: 522

SEQ ID NO: 7002 - protein, 240 aa, Homo sapiens; identical to SEQ ID NO: 523

SEQ ID NO: 7003 - protein, 86 aa, Homo sapiens; identical to SEQ ID NO: 524

SEQ ID NO: 7004 - protein, 21 aa, Homo sapiens
DGVYTGLSTRNQETYETLKHE

SEQ ID NO: 7005 - protein, 66 aa, Homo sapiens; identical to SEQ ID NO: 526

SEQ ID NO: 7006 - protein, 21 aa, Homo sapiens
DGVYTGLSTRNQETYETLKHE

SEQ ID NO: 7007 - protein, 46 aa, Homo sapiens; identical to SEQ ID NO: 528

SEQ ID NO: 7008 - protein, 31 aa, Homo sapiens; identical to SEQ ID NO: 529

SEQ ID NO: 7009 - protein, 27 aa, Homo sapiens
IISFFLALTSTALLFLLFFLTLRFSVV

SEQ ID NO: 7010 - protein, 26 aa, Homo sapiens
VAAILGLGLVLGLLGPLAILLALYLL

SEQ ID NO: 7011 - protein, 363 aa, Homo sapiens; identical to SEQ ID NO: 532

SEQ ID NO: 7012 - protein, 21 aa, Homo sapiens
AVFGCIFGALVIVTVGGFIFW

SEQ ID NO: 7013 - protein, 185 aa, Homo sapiens; identical to SEQ ID NO: 534

SEQ ID NO: 7014 - protein, 106 aa, Homo sapiens; identical to SEQ ID NO: 535

SEQ ID NO: 7015 - protein, 27 aa, Homo sapiens
FWVLVVVGGVLACYSLLVTVAFIIFWV

SEQ ID NO: 7016 - protein, 66 aa, Homo sapiens; identical to SEQ ID NO: 537

SEQ ID NO: 7017 - protein, 33 aa, Homo sapiens; identical to SEQ ID NO: 538

SEQ ID NO: 7018 - protein, 68 aa, Homo sapiens; identical to SEQ ID NO: 449

SEQ ID NO: 7019 - protein, 28 aa, Homo sapiens
MFWVLVVVGGVLACYSLLVTVAFIIFWV

SEQ ID NO: 7020 - protein, 26 aa, Homo sapiens
FWVLVVVGGVLACYSLLVTVAFHFWV

SEQ ID NO: 7021 - protein, 28 aa, Homo sapiens
MFWVLVVVGGVLACYSGGVTVAFIIFWV

SEQ ID NO: 7022 - protein, 26 aa, Homo sapiens
WVLVVVGGVLACYSLLVTVAFIIFWV

SEQ ID NO: 7023 - protein, 69 aa, Homo sapiens; identical to SEQ ID NO: 544

SEQ ID NO: 7024 - protein, 180 aa, Homo sapiens; identical to SEQ ID NO: 545

SEQ ID NO: 7025 - protein, 216 aa, Homo sapiens; identical to SEQ ID NO: 546

SEQ ID NO: 7026 - protein, 140 aa, Homo sapiens; identical to SEQ ID NO: 547

SEQ ID NO: 7027 - protein, 222 aa, Homo sapiens; identical to SEQ ID NO: 454

SEQ ID NO: 7028 - protein, 23 aa, Homo sapiens
LCYLLDGILFIYGVILTALFLRV

SEQ ID NO: 7029 - protein, 51 aa, Homo sapiens; identical to SEQ ID NO: 550

SEQ ID NO: 7030 - protein, 21 aa, Homo sapiens
LCYLLDGILFIYGVILTALFL

SEQ ID NO: 7031 - protein, 25 aa, Homo sapiens
ALIVLGGVAGLLLFIGLGIFFCVRC

SEQ ID NO: 7032 - protein, 22 aa, Homo sapiens
MALIVLGGVAGLLLFIGLGIFF

SEQ ID NO: 7033 - protein, 725 aa, Homo sapiens; identical to SEQ ID NO: 554

SEQ ID NO: 7034 - protein, 23 aa, Homo sapiens
PLFIPVAVMVTAFSGLAFIIWLA

SEQ ID NO: 7035 - protein, 24 aa, Homo sapiens
ALPAALAVISFLLGLGLGVACVLA

SEQ ID NO: 7036 - protein, 21 aa, Homo sapiens
MALPVTALLLPLALLLHAARP

SEQ ID NO: 7037 - protein, 286 aa, Homo sapiens; identical to SEQ ID NO: 558

SEQ ID NO: 7038 - protein, 226 aa, Homo sapiens; identical to SEQ ID NO: 559

SEQ ID NO: 7039 - protein, 83 aa, Homo sapiens; identical to SEQ ID NO: 560

SEQ ID NO: 7040 - protein, 22 aa, Homo sapiens
IWAPLAGTCGVLLLSLVITLYC

SEQ ID NO: 7041 - protein, 24 aa, Homo sapiens
IYIWAPLAGTCGVLLLSLVITLYC

SEQ ID NO: 7042 - protein, 25 aa, Homo sapiens
IYIWAPLAGTCGVLLLSLVITLYCR

SEQ ID NO: 7043 - protein, 71 aa, Homo sapiens; identical to SEQ ID NO: 564

SEQ ID NO: 7044 - protein, 25 aa, Homo sapiens
IYIWAPLAGTCGVLLLSLVITLVCR

SEQ ID NO: 7045 - protein, 21 aa, Homo sapiens
IYIWAPLAGTCGVLLLSLVIT

SEQ ID NO: 7046 - protein, 23 aa, Homo sapiens
IYIWAPLAGTCGVLLLSLVITLY

SEQ ID NO: 7047 - protein, 101 aa, Homo sapiens; identical to SEQ ID NO: 568

SEQ ID NO: 7048 - protein, 52 aa, Homo sapiens; identical to SEQ ID NO: 569

SEQ ID NO: 7049 - protein, 257 aa, Homo sapiens; identical to SEQ ID NO: 570

SEQ ID NO: 7050 - protein, 244 aa, Homo sapiens; identical to SEQ ID NO: 571

SEQ ID NO: 7051 - protein, 86 aa, Homo sapiens; identical to SEQ ID NO: 524

SEQ ID NO: 7052 - protein, 54 aa, Homo sapiens; identical to SEQ ID NO: 573

SEQ ID NO: 7053 - protein, 31 aa, Homo sapiens; identical to SEQ ID NO: 574

SEQ ID NO: 7054 - protein, 68 aa, Homo sapiens; identical to SEQ ID NO: 578

SEQ ID NO: 7055 - protein, 106 aa, Homo sapiens; identical to SEQ ID NO: 579

SEQ ID NO: 7056 - protein, 28 aa, Homo sapiens
FWVLVVVGGVLACYSLLVTVAFIIFWVR

SEQ ID NO: 7057 - protein, 73 aa, Homo sapiens; identical to SEQ ID NO: 581

SEQ ID NO: 7058 - protein, 23 aa, Homo sapiens
LGLLVAGVLVLLVSLGVAIHLCC

SEQ ID NO: 7059 - protein, 27 aa, Homo sapiens
ILLAGLVAADAVASLLIVGAVFLCARR

SEQ ID NO: 7060 - protein, 21 aa, Homo sapiens
FWLPIGCAAFVVVCILGCILI

SEQ ID NO: 7061 - protein, 233 aa, Homo sapiens; identical to SEQ ID NO: 585

SEQ ID NO: 7062 - protein, 21 aa, Homo sapiens
LLFLILGVLSLLLLVTGAFGF

SEQ ID NO: 7063 - protein, 21 aa, Homo sapiens
VAAILGLGLVLGLLGPLAILL

SEQ ID NO: 7064 - protein, 20 aa, Homo sapiens
VGWGGLLGSLVLLVWVLAVI

SEQ ID NO: 7065 - protein, 27 aa, Homo sapiens
FWALVVVAGVLFCYGLLVTVALCVIWT

SEQ ID NO: 7066 - protein, 5 aa, Homo sapiens
DKTHT

SEQ ID NO: 7067 - protein, 4 aa, Homo sapiens
CPPC

SEQ ID NO: 7068 - protein, 15 aa, Homo sapiens
CPEPKSCDTPPPCPR

SEQ ID NO: 7069 - protein, 12 aa, Homo sapiens
ELKTPLGDTTHT

SEQ ID NO: 7070 - protein, 10 aa, Homo sapiens
KSCDKTHTCP

SEQ ID NO: 7071 - protein, 7 aa, Homo sapiens
KCCVDCP

SEQ ID NO: 7072 - protein, 7 aa, Homo sapiens
KYGPPCP

SEQ ID NO: 7073 - protein, 16 aa, Homo sapiens
VEPKSPDKTHTCPPCP

SEQ ID NO: 7074 - protein, 16 aa, Homo sapiens
LDPKSSDKTHTCPPCP

SEQ ID NO: 7075 - protein, 39 aa, Homo sapiens; identical to SEQ ID NO: 599

SEQ ID NO: 7076 - protein, 12 aa, Homo sapiens
GGAVHTRGLDFA

SEQ ID NO: 7077 - protein, 45 aa, Homo sapiens; identical to SEQ ID NO: 601

SEQ ID NO: 7078 - protein, 48 aa, Homo sapiens; identical to SEQ ID NO: 602

SEQ ID NO: 7079 - protein, 45 aa, Homo sapiens; identical to SEQ ID NO: 601

SEQ ID NO: 7080 - protein, 45 aa, Homo sapiens; identical to SEQ ID NO: 601

SEQ ID NO: 7081 - protein, 79 aa, Homo sapiens; identical to SEQ ID NO: 605

SEQ ID NO: 7082 - protein, 51 aa, Homo sapiens; identical to SEQ ID NO: 606

SEQ ID NO: 7083 - protein, 69 aa, Homo sapiens; identical to SEQ ID NO: 607

SEQ ID NO: 7084 - protein, 44 aa, Homo sapiens; identical to SEQ ID NO: 608

SEQ ID NO: 7085 - protein, 47 aa, Homo sapiens; identical to SEQ ID NO: 609

SEQ ID NO: 7086 - protein, 11 aa, Homo sapiens
LDKTHTCPPCP

SEQ ID NO: 7087 - protein, 101 aa, Homo sapiens; identical to SEQ ID NO: 568

SEQ ID NO: 7088 - protein, 16 aa, Homo sapiens
GLAVSTISSFFPPGYQ

SEQ ID NO: 7089 - protein, 16 aa, Homo sapiens
GLAVSTISSFFPPGYQ

SEQ ID NO: 7090 - protein, 282 aa, Homo sapiens; identical to SEQ ID NO: 614

SEQ ID NO: 7091 - protein, 246 aa, Homo sapiens; identical to SEQ ID NO: 615

SEQ ID NO: 7092 - protein, 45 aa, Homo sapiens; identical to SEQ ID NO: 616

SEQ ID NO: 7093 - protein, 16 aa, Homo sapiens
LEPKSCDKTHTCPPCP

SEQ ID NO: 7094 - protein, 43 aa, Homo sapiens; identical to SEQ ID NO: 618

SEQ ID NO: 7095 - protein, 15 aa, Homo sapiens
EPKSCDKTHTCPPCP

SEQ ID NO: 7096 - protein, 16 aa, Homo sapiens
ELKTPLGDTHTCPRCP

SEQ ID NO: 7097 - protein, 15 aa, Homo sapiens
EPKSCDTPPPCPRCP

SEQ ID NO: 7098 - protein, 12 aa, Homo sapiens
ESKYGPPCPSCP

SEQ ID NO: 7099 - protein, 12 aa, Homo sapiens
ERKCCVECPPCP

SEQ ID NO: 7100 - protein, 229 aa, Homo sapiens; identical to SEQ ID NO: 624

SEQ ID NO: 7101 - protein, 119 aa, Homo sapiens; identical to SEQ ID NO: 625

SEQ ID NO: 7102 - protein, 282 aa, Homo sapiens; identical to SEQ ID NO: 614

SEQ ID NO: 7103 - protein, 281 aa, Homo sapiens; identical to SEQ ID NO: 627

SEQ ID NO: 7104 - protein, 283 aa, Homo sapiens; identical to SEQ ID NO: 628

SEQ ID NO: 7105 - protein, 58 aa, Homo sapiens; identical to SEQ ID NO: 629

SEQ ID NO: 7106 - protein, 282 aa, Homo sapiens; identical to SEQ ID NO: 614

SEQ ID NO: 7107 - protein, 282 aa, Homo sapiens; identical to SEQ ID NO: 614

SEQ ID NO: 7108 - protein, 282 aa, Homo sapiens; identical to SEQ ID NO: 614

SEQ ID NO: 7109 - protein, 282 aa, Homo sapiens; identical to SEQ ID NO: 614

SEQ ID NO: 7110 - protein, 234 aa, Homo sapiens; identical to SEQ ID NO: 634
  MOD_RES 91: note = Selenocysteine

SEQ ID NO: 7111 - protein, 234 aa, Homo sapiens; identical to SEQ ID NO: 635

SEQ ID NO: 7112 - protein, 20 aa, Homo sapiens
AEPKSPDKTHTCPPCPKDPK

SEQ ID NO: 7113 - protein, 15 aa, Homo sapiens
EPKSCDKTHTCPPCP

SEQ ID NO: 7114 - protein, 233 aa, Homo sapiens; identical to SEQ ID NO: 638

SEQ ID NO: 7115 - protein, 13 aa, Homo sapiens
SVFLFPPKPKDTL

SEQ ID NO: 7116 - protein, 231 aa, Homo sapiens; identical to SEQ ID NO: 640

SEQ ID NO: 7117 - protein, 235 aa, Homo sapiens; identical to SEQ ID NO: 641

SEQ ID NO: 7118 - protein, 223 aa, Homo sapiens; identical to SEQ ID NO: 642

SEQ ID NO: 7119 - protein, 235 aa, Homo sapiens; identical to SEQ ID NO: 643

SEQ ID NO: 7120 - protein, 12 aa, Homo sapiens
ERKCCVECPPCP

SEQ ID NO: 7121 - protein, 17 aa, Homo sapiens
ELKTPLGDTTHTCPRCP

SEQ ID NO: 7122 - protein, 61 aa, Homo sapiens; identical to SEQ ID NO: 646

SEQ ID NO: 7123 - protein, 230 aa, Homo sapiens; identical to SEQ ID NO: 647

SEQ ID NO: 7124 - protein, 230 aa, Homo sapiens; identical to SEQ ID NO: 648

SEQ ID NO: 7125 - protein, 12 aa, Homo sapiens
SPNMVPHAHHAQ

SEQ ID NO: 7126 - protein, 107 aa, Homo sapiens; identical to SEQ ID NO: 650

SEQ ID NO: 7127 - protein, 129 aa, Homo sapiens; identical to SEQ ID NO: 651

SEQ ID NO: 7128 - protein, 229 aa, Homo sapiens; identical to SEQ ID NO: 652

SEQ ID NO: 7129 - protein, 229 aa, Homo sapiens; identical to SEQ ID NO: 653

SEQ ID NO: 7130 - protein, 230 aa, Homo sapiens; identical to SEQ ID NO: 647

SEQ ID NO: 7131 - DNA, 36 bp, Homo sapiens; identical to SEQ ID NO: 655
  source 1..36: mol_type = other DNA

SEQ ID NO: 7132 - protein, 12 aa, Homo sapiens
ESKYGPPCPPCP

SEQ ID NO: 7133 - protein, 119 aa, Homo sapiens; identical to SEQ ID NO: 625

SEQ ID NO: 7134 - protein, 229 aa, Homo sapiens; identical to SEQ ID NO: 624

SEQ ID NO: 7135 - protein, 229 aa, Homo sapiens; identical to SEQ ID NO: 624

SEQ ID NO: 7136 - protein, 12 aa, Homo sapiens
ESKYGPPCPPCP

SEQ ID NO: 7137 - protein, 9 aa, Homo sapiens
YGPPCPPCP

SEQ ID NO: 7138 - protein, 10 aa, Homo sapiens
KYGPPCPPCP

SEQ ID NO: 7139 - protein, 13 aa, Homo sapiens
EVVKYGPPCPPCP

SEQ ID NO: 7140 - protein, 229 aa, Homo sapiens; identical to SEQ ID NO: 664

SEQ ID NO: 7141 - protein, 22 aa, Homo sapiens
ESKYGPPCPPCPGGGSSGGGSG

SEQ ID NO: 7142 - protein, 231 aa, Homo sapiens; identical to SEQ ID NO: 666

SEQ ID NO: 7143 - protein, 231 aa, Homo sapiens; identical to SEQ ID NO: 667

SEQ ID NO: 7144 - protein, 231 aa, Homo sapiens; identical to SEQ ID NO: 640

SEQ ID NO: 7145 - protein, 486 aa, synthetic construct; identical to SEQ ID NO: 669
  REGION 1..486: note = Description of Artificial Sequence: Synthetic Construct

SEQ ID NO: 7146 - protein, 593 aa, synthetic construct; identical to SEQ ID NO: 670
  REGION 1..593: note = Description of Artificial Sequence: Synthetic Construct

SEQ ID NO: 7147 - protein, 644 aa, synthetic construct; identical to SEQ ID NO: 671
  REGION 1..644: note = Description of Artificial Sequence: Synthetic Construct

SEQ ID NO: 7148 - protein, 593 aa, synthetic construct; identical to SEQ ID NO: 672
  REGION 1..593: note = Description of Artificial Sequence: Synthetic Construct

SEQ ID NO: 7149 - protein, 644 aa, synthetic construct; identical to SEQ ID NO: 673
  REGION 1..644: note = Description of Artificial Sequence: Synthetic Construct

SEQ ID NO: 7150 - protein, 649 aa, synthetic construct; identical to SEQ ID NO: 674
  REGION 1..649: note = Description of Artificial Sequence: Synthetic Construct

SEQ ID NO: 7151 - protein, 598 aa, synthetic construct; identical to SEQ ID NO: 675
  REGION 1..598: note = Description of Artificial Sequence: Synthetic Construct

SEQ ID NO: 7152 - protein, 677 aa, synthetic construct; identical to SEQ ID NO: 676
  REGION 1..677: note = Description of Artificial Sequence: Synthetic Construct

SEQ ID NO: 7153 - protein, 677 aa, synthetic construct; identical to SEQ ID NO: 677
  REGION 1..677: note = Description of Artificial Sequence: Synthetic Construct

SEQ ID NO: 7154 - protein, 677 aa, synthetic construct; identical to SEQ ID NO: 678
  REGION 1..677: note = Description of Artificial Sequence: Synthetic Construct

SEQ ID NO: 7155 - protein, 677 aa, synthetic construct; identical to SEQ ID NO: 679
  REGION 1..677: note = Description of Artificial Sequence: Synthetic Construct

SEQ ID NO: 7156 - protein, 607 aa, synthetic construct; identical to SEQ ID NO: 680
  REGION 1..607: note = Description of Artificial Sequence: Synthetic Construct

SEQ ID NO: 7157 - protein, 658 aa, synthetic construct; identical to SEQ ID NO: 681
  REGION 1..658: note = Description of Artificial Sequence: Synthetic Construct

SEQ ID NO: 7158 - protein, 686 aa, synthetic construct; identical to SEQ ID NO: 682
  REGION 1..686: note = Description of Artificial Sequence: Synthetic Construct

SEQ ID NO: 7159 - protein, 686 aa, synthetic construct; identical to SEQ ID NO: 683
  REGION 1..686: note = Description of Artificial Sequence: Synthetic Construct

SEQ ID NO: 7160 - protein, 677 aa, synthetic construct; identical to SEQ ID NO: 676
  REGION 1..677: note = Description of Artificial Sequence: Synthetic Construct

SEQ ID NO: 7161 - protein, 488 aa, synthetic construct; identical to SEQ ID NO: 685
  REGION 1..488: note = Description of Artificial Sequence: Synthetic Construct

SEQ ID NO: 7162 - protein, 508 aa, synthetic construct; identical to SEQ ID NO: 686
  REGION 1..508: note = Description of Artificial Sequence: Synthetic Construct

SEQ ID NO: 7163 - protein, 497 aa, synthetic construct; identical to SEQ ID NO: 687
  REGION 1..497: note = Description of Artificial Sequence: Synthetic Construct

SEQ ID NO: 7164 - protein, 502 aa, synthetic construct; identical to SEQ ID NO: 688
  REGION 1..502: note = Description of Artificial Sequence: Synthetic Construct

SEQ ID NO: 7165 - protein, 486 aa, synthetic construct; identical to SEQ ID NO: 669
  REGION 1..486: note = Description of Artificial Sequence: Synthetic Construct

SEQ ID NO: 7166 - protein, 743 aa, synthetic construct; identical to SEQ ID NO: 690
  REGION 1..743: note = Description of Artificial Sequence: Synthetic Construct

SEQ ID NO: 7167 - protein, 885 aa, synthetic construct; identical to SEQ ID NO: 691
  REGION 1..885: note = Description of Artificial Sequence: Synthetic Construct

SEQ ID NO: 7168 - protein, 907 aa, synthetic construct; identical to SEQ ID NO: 692
  REGION 1..907: note = Description of Artificial Sequence: Synthetic Construct

SEQ ID NO: 7169 - protein, 903 aa, synthetic construct; identical to SEQ ID NO: 693
  REGION 1..903: note = Description of Artificial Sequence: Synthetic Construct

SEQ ID NO: 7170 - protein, 107 aa, Homo sapiens; identical to SEQ ID NO: 192

SEQ ID NO: 7171 - protein, 187 aa, Homo sapiens; identical to SEQ ID NO: 1

SEQ ID NO: 7172 - protein, 159 aa, Escherichia coli [sequence omitted]

SEQ ID NO: 7173 - protein, 327 aa, Homo sapiens; identical to SEQ ID NO: 195

SEQ ID NO: 7174 - protein, 189 aa, Homo sapiens; identical to SEQ ID NO: 196

SEQ ID NO: 7175 - protein, 260 aa, Homo sapiens; identical to SEQ ID NO: 197

SEQ ID NO: 7176 - protein, 231 aa, Homo sapiens; identical to SEQ ID NO: 198

SEQ ID NO: 7177 - protein, 114 aa, Homo sapiens; identical to SEQ ID NO: 718

SEQ ID NO: 7178 - protein, 267 aa, Homo sapiens; identical to SEQ ID NO: 719

SEQ ID NO: 7179 - protein, 234 aa, Homo sapiens; identical to SEQ ID NO: 720

SEQ ID NO: 7180 - protein, 231 aa, Homo sapiens; identical to SEQ ID NO: 721

SEQ ID NO: 7181 - protein, 353 aa, Homo sapiens; identical to SEQ ID NO: 722

SEQ ID NO: 7182 - protein, 61 aa, Homo sapiens; identical to SEQ ID NO: 723

SEQ ID NO: 7183 - protein, 237 aa, Homo sapiens; identical to SEQ ID NO: 724

SEQ ID NO: 7184 - protein, 175 aa, Homo sapiens; identical to SEQ ID NO: 725

SEQ ID NO: 7185 - protein, 65 aa, Homo sapiens; identical to SEQ ID NO: 726

SEQ ID NO: 7186 - protein, 134 aa, synthetic construct; identical to SEQ ID NO: 1856
  REGION 1..134: note = Description of Artificial Sequence: Synthetic polypeptide

SEQ ID NO: 7187 - protein, 303 aa, synthetic construct; identical to SEQ ID NO: 1858
  REGION 1..303: note = Description of Artificial Sequence: Synthetic polypeptide

SEQ ID NO: 7188 - protein, 143 aa, synthetic construct; identical to SEQ ID NO: 1860
  REGION 1..143: note = Description of Artificial Sequence: Synthetic polypeptide

SEQ ID NO: 7189 - protein, 389 aa, synthetic construct; identical to SEQ ID NO: 1862
  REGION 1..389: note = Description of Artificial Sequence: Synthetic polypeptide

SEQ ID NO: 7190 - protein, 577 aa, synthetic construct; identical to SEQ ID NO: 1864
  REGION 1..577: note = Description of Artificial Sequence: Synthetic polypeptide

SEQ ID NO: 7191 - protein, 555 aa, synthetic construct; identical to SEQ ID NO: 1949
  REGION 1..555: note = Description of Artificial Sequence: Synthetic polypeptide

SEQ ID NO: 7192 - protein, 504 aa, synthetic construct; identical to SEQ ID NO: 1951
  REGION 1..504: note = Description of Artificial Sequence: Synthetic polypeptide

SEQ ID NO: 7193 - protein, 395 aa, synthetic construct [sequence omitted]

SEQ ID NO: 7194 - protein, 555 aa, synthetic construct; identical to SEQ ID NO: 1955
  REGION 1..555: note = Description of Artificial Sequence: Synthetic polypeptide

SEQ ID NO: 7195 - protein, 583 aa, synthetic construct; identical to SEQ ID NO: 1957
  REGION 1..583: note = Description of Artificial Sequence: Synthetic polypeptide

SEQ ID NO: 7196 - protein, 583 aa, synthetic construct; identical to SEQ ID NO: 1959
  REGION 1..583: note = Description of Artificial Sequence: Synthetic polypeptide

SEQ ID NO: 7197 - protein, 583 aa, synthetic construct; identical to SEQ ID NO: 1961
  REGION 1..583: note = Description of Artificial Sequence: Synthetic construct

SEQ ID NO: 7198 - protein, 583 aa, synthetic construct; identical to SEQ ID NO: 1965
  REGION 1..583: note = Description of Artificial Sequence: Synthetic construct

SEQ ID NO: 7199 - protein, 403 aa, synthetic construct; identical to SEQ ID NO: 1969
  REGION 1..403: note = Description of Artificial Sequence: Synthetic construct

SEQ ID NO: 7200 - protein, 403 aa, synthetic construct; identical to SEQ ID NO: 1971
  REGION 1..403: note = Description of Artificial Sequence: Synthetic construct

SEQ ID NO: 7201 - protein, 371 aa, synthetic construct; identical to SEQ ID NO: 1973
  REGION 1..371: note = Description of Artificial Sequence: Synthetic construct

SEQ ID NO: 7202 - protein, 407 aa, synthetic construct; identical to SEQ ID NO: 1975
  REGION 1..407: note = Description of Artificial Sequence: Synthetic construct

SEQ ID NO: 7203 - protein, 397 aa, synthetic construct; identical to SEQ ID NO: 1977
  REGION 1..397: note = Description of Artificial Sequence: Synthetic construct

SEQ ID NO: 7204 - protein, 407 aa, synthetic construct; identical to SEQ ID NO: 1975
  REGION 1..407: note = Description of Artificial Sequence: Synthetic construct

SEQ ID NO: 7205 - protein, 371 aa, synthetic construct; identical to SEQ ID NO: 2140
  REGION 1..371: note = Description of Artificial Sequence: Synthetic construct

SEQ ID NO: 7206 - protein, 573 aa, synthetic construct; identical to SEQ ID NO: 1984
  REGION 1..573: note = Description of Artificial Sequence: Synthetic construct

SEQ ID NO: 7207 - protein, 414 aa, synthetic construct; identical to SEQ ID NO: 1986
  REGION 1..414: note = Description of Artificial Sequence: Synthetic construct

SEQ ID NO: 7208 - protein, 601 aa, synthetic construct; identical to SEQ ID NO: 1988
  REGION 1..601: note = Description of Artificial Sequence: Synthetic construct

SEQ ID NO: 7209 - protein, 601 aa, synthetic construct; identical to SEQ ID NO: 1990
  REGION 1..601: note = Description of Artificial Sequence: Synthetic construct

SEQ ID NO: 7210 - protein, 601 aa, synthetic construct; identical to SEQ ID NO: 1992
  REGION 1..601: note = Description of Artificial Sequence: Synthetic construct

SEQ ID NO: 7211 - protein, 601 aa, synthetic construct; identical to SEQ ID NO: 1994
  REGION 1..601: note = Description of Artificial Sequence: Synthetic construct

SEQ ID NO: 7212 - protein, 601 aa, synthetic construct; identical to SEQ ID NO: 1996
  REGION 1..601: note = Description of Artificial Sequence: Synthetic construct

SEQ ID NO: 7213 - protein, 601 aa, synthetic construct; identical to SEQ ID NO: 1998
  REGION 1..601: note = Description of Artificial Sequence: Synthetic construct

SEQ ID NO: 7214 - protein, 320 aa, synthetic construct; identical to SEQ ID NO: 2004
  REGION 1..320: note = Description of Artificial Sequence: Synthetic construct

SEQ ID NO: 7215 - protein, 134 aa, synthetic construct; identical to SEQ ID NO: 2025
  REGION 1..134: note = Description of Artificial Sequence: Synthetic construct

SEQ ID NO: 7216 - protein, 681 aa, synthetic construct; identical to SEQ ID NO: 2000
  REGION 1..681: note = Description of Artificial Sequence: Synthetic construct

SEQ ID NO: 7217 - protein, 652 aa, synthetic construct; identical to SEQ ID NO: 2002
  REGION 1..652: note = Description of Artificial Sequence: Synthetic construct

SEQ ID NO: 7218 - protein, 583 aa, synthetic construct; identical to SEQ ID NO: 1963
  REGION 1..583: note = Description of Artificial Sequence: Synthetic polypeptide

SEQ ID NO: 7219 - protein, 320 aa, synthetic construct; identical to SEQ ID NO: 2004
  REGION 1..320: note = Description of Artificial Sequence: Synthetic construct

SEQ ID NO: 7220 - protein, 134 aa, synthetic construct; identical to SEQ ID NO: 2025
  REGION 1..134: note = Description of Artificial Sequence: Synthetic construct

SEQ ID NO: 7221 - protein, 107 aa, Homo sapiens; identical to SEQ ID NO: 192

SEQ ID NO: 7222 - protein, 187 aa, Homo sapiens; identical to SEQ ID NO: 1

SEQ ID NO: 7223 - protein, 159 aa, Escherichia coli [sequence omitted]

SEQ ID NO: 7224 - protein, 327 aa, Homo sapiens; identical to SEQ ID NO: 195

SEQ ID NO: 7225 - protein, 189 aa, Homo sapiens; identical to SEQ ID NO: 196

SEQ ID NO: 7226 - protein, 260 aa, Homo sapiens; identical to SEQ ID NO: 197

SEQ ID NO: 7227 - protein, 231 aa, Homo sapiens; identical to SEQ ID NO: 198

SEQ ID NO: 7228 - protein, 306 aa, Homo sapiens; identical to SEQ ID NO: 734

SEQ ID NO: 7229 - protein, 197 aa, Homo sapiens; identical to SEQ ID NO: 735

SEQ ID NO: 7230 - protein, 652 aa, synthetic construct; identical to SEQ ID NO: 1821
  REGION 1..652: note = Description of Artificial Sequence: Synthetic construct

SEQ ID NO: 7231 - protein, 653 aa, synthetic construct; identical to SEQ ID NO: 1823
  REGION 1..653: note = Description of Artificial Sequence: Synthetic construct

SEQ ID NO: 7232 - protein, 656 aa, synthetic construct; identical to SEQ ID NO: 1825
  REGION 1..656: note = Description of Artificial Sequence: Synthetic construct

SEQ ID NO: 7233 - protein, 655 aa, synthetic construct; identical to SEQ ID NO: 1827
  REGION 1..655: note = Description of Artificial Sequence: Synthetic construct

SEQ ID NO: 7234 - protein, 651 aa, synthetic construct; identical to SEQ ID NO: 1829
  REGION 1..651: note = Description of Artificial Sequence: Synthetic construct

SEQ ID NO: 7235 - protein, 540 aa, synthetic construct; identical to SEQ ID NO: 1831
  REGION 1..540: note = Description of Artificial Sequence: Synthetic construct

SEQ ID NO: 7236 - protein, 710 aa, synthetic construct; identical to SEQ ID NO: 1833
  REGION 1..710: note = Description of Artificial Sequence: Synthetic construct

SEQ ID NO: 7237 - protein, 738 aa, synthetic construct; identical to SEQ ID NO: 1835
  REGION 1..738: note = Description of Artificial Sequence: Synthetic construct

SEQ ID NO: 7238 - protein, 659 aa, synthetic construct; identical to SEQ ID NO: 1837
  REGION 1..659: note = Description of Artificial Sequence: Synthetic construct

SEQ ID NO: 7239 - protein, 306 aa, synthetic construct; identical to SEQ ID NO: 1807
  REGION 1..306: note = Description of Artificial Sequence: Synthetic Payload

SEQ ID NO: 7240 - protein, 107 aa, Homo sapiens; identical to SEQ ID NO: 192

SEQ ID NO: 7241 - protein, 159 aa, Escherichia coli [sequence omitted]

SEQ ID NO: 7242 - protein, 187 aa, Homo sapiens; identical to SEQ ID NO: 1

SEQ ID NO: 7243 - protein, 327 aa, Homo sapiens; identical to SEQ ID NO: 195

SEQ ID NO: 7244 - protein, 189 aa, Homo sapiens; identical to SEQ ID NO: 196

SEQ ID NO: 7245 - protein, 260 aa, Homo sapiens; identical to SEQ ID NO: 197

SEQ ID NO: 7246 - protein, 231 aa, Homo sapiens; identical to SEQ ID NO: 198

SEQ ID NO: 7247 - protein, 766 aa, Homo sapiens; identical to SEQ ID NO: 1172

SEQ ID NO: 7248 - protein, 133 aa, Homo sapiens [sequence omitted]

SEQ ID NO: 7249 - protein, 415 aa, Homo sapiens; identical to SEQ ID NO: 744

SEQ ID NO: 7250 - protein, 431 aa, Homo sapiens; identical to SEQ ID NO: 745

SEQ ID NO: 7251 - protein, 430 aa, synthetic construct; identical to SEQ ID NO: 746
  REGION 1..430: note = Description of Artificial Sequence: Synthetic Payload

SEQ ID NO: 7252 - protein, 396 aa, Homo sapiens; identical to SEQ ID NO: 747

SEQ ID NO: 7253 - protein, 395 aa, synthetic construct; identical to SEQ ID NO: 748
  REGION 1..395: note = Description of Artificial Sequence: Synthetic Payload

SEQ ID NO: 7254 - protein, 119 aa, synthetic construct; identical to SEQ ID NO: 749
  REGION 1..119: note = Description of Artificial Sequence: Synthetic Antibody variable domain

SEQ ID NO: 7255 - protein, 118 aa, synthetic construct; identical to SEQ ID NO: 750
  REGION 1..118: note = Description of Artificial Sequence: Synthetic Antibody variable domain

SEQ ID NO: 7256 - protein, 118 aa, synthetic construct; identical to SEQ ID NO: 750
  REGION 1..118: note = Description of Artificial Sequence: Synthetic Antibody variable domain

SEQ ID NO: 7257 - protein, 120 aa, synthetic construct; identical to SEQ ID NO: 752
  REGION 1..120: note = Description of Artificial Sequence: Synthetic Antibody variable domain

SEQ ID NO: 7258 - protein, 119 aa, synthetic construct; identical to SEQ ID NO: 753
  REGION 1..119: note = Description of Artificial Sequence: Synthetic Antibody variable domain

SEQ ID NO: 7259 - protein, 119 aa, synthetic construct; identical to SEQ ID NO: 754
  REGION 1..119: note = Description of Artificial Sequence: Synthetic Antibody variable domain

SEQ ID NO: 7260 - protein, 117 aa, synthetic construct; identical to SEQ ID NO: 755
  REGION 1..117: note = Description of Artificial Sequence: Synthetic Antibody variable domain

SEQ ID NO: 7261 - protein, 119 aa, synthetic construct; identical to SEQ ID NO: 756
  REGION 1..119: note = Description of Artificial Sequence: Synthetic Antibody variable domain

SEQ ID NO: 7262 - protein, 112 aa, synthetic construct; identical to SEQ ID NO: 757
  REGION 1..112: note = Description of Artificial Sequence: Synthetic Antibody variable domain

SEQ ID NO: 7263 - protein, 111 aa, synthetic construct; identical to SEQ ID NO: 758
  REGION 1..111: note = Description of Artificial Sequence: Synthetic Antibody variable domain

SEQ ID NO: 7264 - protein, 112 aa, synthetic construct; identical to SEQ ID NO: 759
  REGION 1..112: note = Description of Artificial Sequence: Synthetic Antibody variable domain

SEQ ID NO: 7265 - protein, 107 aa, synthetic construct; identical to SEQ ID NO: 760
  REGION 1..107: note = Description of Artificial Sequence: Synthetic Antibody variable domain

SEQ ID NO: 7266 - protein, 112 aa, synthetic construct; identical to SEQ ID NO: 761
  REGION 1..112: note = Description of Artificial Sequence: Synthetic Antibody variable domain

SEQ ID NO: 7267 - protein, 111 aa, synthetic construct; identical to SEQ ID NO: 762
  REGION 1..111: note = Description of Artificial Sequence: Synthetic Antibody variable domain

SEQ ID NO: 7268 - protein, 112 aa, synthetic construct; identical to SEQ ID NO: 763
  REGION 1..112: note = Description of Artificial Sequence: Synthetic Antibody variable domain

SEQ ID NO: 7269 - protein, 107 aa, synthetic construct; identical to SEQ ID NO: 764
  REGION 1..107: note = Description of Artificial Sequence: Synthetic Antibody variable domain

SEQ ID NO: 7270 - protein, 246 aa, synthetic construct; identical to SEQ ID NO: 765
  REGION 1..246: note = Description of Artificial Sequence: Synthetic scFv

SEQ ID NO: 7271 - protein, 242 aa, synthetic construct; identical to SEQ ID NO: 768
  REGION 1..242: note = Description of Artificial Sequence: Synthetic scFv

SEQ ID NO: 7272 - protein, 248 aa, synthetic construct; identical to SEQ ID NO: 769
  REGION 1..248: note = Description of Artificial Sequence: Synthetic scFv

SEQ ID NO: 7273 - protein, 247 aa, synthetic construct; identical to SEQ ID NO: 770
  REGION 1..247: note = Description of Artificial Sequence: Synthetic scFv

SEQ ID NO: 7274 - protein, 246 aa, synthetic construct; identical to SEQ ID NO: 771
  REGION 1..246: note = Description of Artificial Sequence: Synthetic scFv

SEQ ID NO: 7275 - protein, 243 aa, synthetic construct; identical to SEQ ID NO: 772
  REGION 1..243: note = Description of Artificial Sequence: Synthetic scFv

SEQ ID NO: 7276 - protein, 107 aa, synthetic construct; identical to SEQ ID NO: 773
  REGION 1..107: note = Description of Artificial Sequence: Synthetic Antibody variable domain

SEQ ID NO: 7277 - protein, 108 aa, synthetic construct; identical to SEQ ID NO: 774
  REGION 1..108: note = Description of Artificial Sequence: Synthetic Antibody variable domain

SEQ ID NO: 7278 - protein, 124 aa, synthetic construct; identical to SEQ ID NO: 775
  REGION 1..124: note = Description of Artificial Sequence: Synthetic Antibody variable domain

SEQ ID NO: 7279 - protein, 122 aa, synthetic construct; identical to SEQ ID NO: 776
  REGION 1..122: note = Description of Artificial Sequence: Synthetic Antibody variable domain

SEQ ID NO: 7280 - protein, 122 aa, synthetic construct; identical to SEQ ID NO: 777
  REGION 1..122: note = Description of Artificial Sequence: Synthetic Antibody variable domain

SEQ ID NO: 7281 - protein, 236 aa, synthetic construct; identical to SEQ ID NO: 778
  REGION 1..236: note = Description of Artificial Sequence: Synthetic scFv

SEQ ID NO: 7282 - protein, 245 aa, synthetic construct; identical to SEQ ID NO: 779
  REGION 1..245: note = Description of Artificial Sequence: Synthetic scFv

SEQ ID NO: 7283 - protein, 245 aa, synthetic construct; identical to SEQ ID NO: 780
  REGION 1..245: note = Description of Artificial Sequence: Synthetic scFv

SEQ ID NO: 7284 - protein, 120 aa, Mus musculus; identical to SEQ ID NO: 781

SEQ ID NO: 7285 - protein, 119 aa, synthetic construct; identical to SEQ ID NO: 782
  REGION 1..119: note = Description of Artificial Sequence: Synthetic Antibody variable domain

SEQ ID NO: 7286 - protein, 122 aa, synthetic construct; identical to SEQ ID NO: 783
  REGION 1..122: note = Description of Artificial Sequence: Synthetic Antibody variable domain

SEQ ID NO: 7287 - protein, 117 aa, synthetic construct; identical to SEQ ID NO: 784
  REGION 1..117: note = Description of Artificial Sequence: Synthetic Antibody variable domain

SEQ ID NO: 7288 - protein, 107 aa, Mus musculus; identical to SEQ ID NO: 785

SEQ ID NO: 7289 - protein, 109 aa, synthetic construct; identical to SEQ ID NO: 786
  REGION 1..109: note = Description of Artificial Sequence: Synthetic Antibody variable domain

SEQ ID NO: 7290 - protein, 110 aa, synthetic construct; identical to SEQ ID NO: 787
  REGION 1..110: note = Description of Artificial Sequence: Synthetic Antibody variable domain

SEQ ID NO: 7291 - protein, 109 aa, synthetic construct; identical to SEQ ID NO: 788
  REGION 1..109: note = Description of Artificial Sequence: Synthetic Antibody variable domain

SEQ ID NO: 7292 - protein, 244 aa, synthetic construct; identical to SEQ ID NO: 789
  REGION 1..244: note = Description of Artificial Sequence: Synthetic scFv

SEQ ID NO: 7293 - protein, 244 aa, synthetic construct; identical to SEQ ID NO: 790
  REGION 1..244: note = Description of Artificial Sequence: Synthetic scFv

SEQ ID NO: 7294 - protein, 248 aa, synthetic construct; identical to SEQ ID NO: 791
  REGION 1..248: note = Description of Artificial Sequence: Synthetic scFv

SEQ ID NO: 7295 - protein, 242 aa, synthetic construct; identical to SEQ ID NO: 792
  REGION 1..242: note = Description of Artificial Sequence: Synthetic scFv

SEQ ID NO: 7296 - protein, 449 aa, synthetic construct; identical to SEQ ID NO: 793
  REGION 1..449: note = Description of Artificial Sequence: Synthetic Antibody variable domain

SEQ ID NO: 7297 - protein, 211 aa, synthetic construct; identical to SEQ ID NO: 794
  REGION 1..211: note = Description of Artificial Sequence: Synthetic Antibody variable domain

SEQ ID NO: 7298 - protein, 446 aa, synthetic construct; identical to SEQ ID NO: 795
  REGION 1..446: note = Description of Artificial Sequence: Synthetic Antibody variable domain

SEQ ID NO: 7299 - protein, 448 aa, synthetic construct; identical to SEQ ID NO: 796
  REGION 1..448: note = Description of Artificial Sequence: Synthetic Antibody variable domain

SEQ ID NO: 7300 - protein, 211 aa, synthetic construct; identical to SEQ ID NO: 797
  REGION 1..211: note = Description of Artificial Sequence: Synthetic Antibody variable domain

SEQ ID NO: 7301 - protein, 448 aa, synthetic construct; identical to SEQ ID NO: 798
  REGION 1..448: note = Description of Artificial Sequence: Synthetic Antibody variable domain

SEQ ID NO: 7302 - protein, 211 aa, synthetic construct; identical to SEQ ID NO: 799
  REGION 1..211: note = Description of Artificial Sequence: Synthetic Antibody variable domain

SEQ ID NO: 7303 - protein, 446 aa, synthetic construct; identical to SEQ ID NO: 800
  REGION 1..446: note = Description of Artificial Sequence: Synthetic Antibody variable domain

SEQ ID NO: 7304 - protein, 105 aa, Homo sapiens; identical to SEQ ID NO: 801

SEQ ID NO: 7305 - protein, 102 aa, Homo sapiens; identical to SEQ ID NO: 802

SEQ ID NO: 7306 - protein, 449 aa, synthetic construct; identical to SEQ ID NO: 793
  REGION 1..449: note = Description of Artificial Sequence: Synthetic Antibody variable domain

SEQ ID NO: 7307 - protein, 211 aa, synthetic construct; identical to SEQ ID NO: 794
  REGION 1..211: note = Description of Artificial Sequence: Synthetic Antibody variable domain

SEQ ID NO: 7308 - protein, 449 aa, synthetic construct; identical to SEQ ID NO: 805
  REGION 1..449: note = Description of Artificial Sequence: Synthetic Antibody variable domain

SEQ ID NO: 7309 - protein, 211 aa, synthetic construct; identical to SEQ ID NO: 806
  REGION 1..211: note = Description of Artificial Sequence: Synthetic Antibody variable domain

SEQ ID NO: 7310 - protein, 446 aa, synthetic construct; identical to SEQ ID NO: 795
  REGION 1..446: note = Description of Artificial Sequence: Synthetic Antibody variable domain

SEQ ID NO: 7311 - protein, 446 aa, synthetic construct; identical to SEQ ID NO: 800
  REGION 1..446: note = Description of Artificial Sequence: Synthetic Antibody variable domain

SEQ ID NO: 7312 - protein, 119 aa, synthetic construct; identical to SEQ ID NO: 809
  REGION 1..119: note = Description of Artificial Sequence: Synthetic Antibody variable domain

SEQ ID NO: 7313 - protein, 104 aa, synthetic construct; identical to SEQ ID NO: 810
  REGION 1..104: note = Description of Artificial Sequence: Synthetic Antibody variable domain

SEQ ID NO: 7314 - protein, 118 aa, synthetic construct; identical to SEQ ID NO: 811
  REGION 1..118: note = Description of Artificial Sequence: Synthetic Antibody variable domain

SEQ ID NO: 7315 - protein, 118 aa, synthetic construct; identical to SEQ ID NO: 812
  REGION 1..118: note = Description of Artificial Sequence: Synthetic Antibody variable domain

SEQ ID NO: 7316 - protein, 108 aa, synthetic construct; identical to SEQ ID NO: 813
  REGION 1..108: note = Description of Artificial Sequence: Synthetic Antibody variable domain

SEQ ID NO: 7317 - protein, 108 aa, synthetic construct; identical to SEQ ID NO: 814
  REGION 1..108: note = Description of Artificial Sequence: Synthetic Antibody variable domain

SEQ ID NO: 7318 - protein, 113 aa, synthetic construct; identical to SEQ ID NO: 815
  REGION 1..113: note = Description of Artificial Sequence: Synthetic Antibody variable domain

SEQ ID NO: 7319 - protein, 113 aa, synthetic construct; identical to SEQ ID NO: 816
  REGION 1..113: note = Description of Artificial Sequence: Synthetic Antibody variable domain

SEQ ID NO: 7320 - protein, 118 aa, synthetic construct; identical to SEQ ID NO: 811
  REGION 1..118: note = Description of Artificial Sequence: Synthetic Antibody variable domain

SEQ ID NO: 7321 - protein, 118 aa, synthetic construct; identical to SEQ ID NO: 812
  REGION 1..118: note = Description of Artificial Sequence: Synthetic Antibody variable domain

SEQ ID NO: 7322 - protein, 108 aa, synthetic construct; identical to SEQ ID NO: 813
  REGION 1..108: note = Description of Artificial Sequence: Synthetic Antibody variable domain

SEQ ID NO: 7323 - protein, 108 aa, synthetic construct; identical to SEQ ID NO: 814
  REGION 1..108: note = Description of Artificial Sequence: Synthetic Antibody variable domain

SEQ ID NO: 7324 - protein, 240 aa, synthetic construct; identical to SEQ ID NO: 821
  REGION 1..240: note = Description of Artificial Sequence: Synthetic Antibody variable domain

SEQ ID NO: 7325 - protein, 462 aa, synthetic construct; identical to SEQ ID NO: 822
  REGION 1..462: note = Description of Artificial Sequence: Synthetic Antibody variable domain

SEQ ID NO: 7326 - protein, 120 aa, synthetic construct; identical to SEQ ID NO: 823
  REGION 1..120: note = Description of Artificial Sequence: Synthetic Antibody variable domain

SEQ ID NO: 7327 - protein, 112 aa, synthetic construct; identical to SEQ ID NO: 824
  REGION 1..112: note = Description of Artificial Sequence: Synthetic Antibody variable domain

SEQ ID NO: 7328 - protein, 120 aa, synthetic construct; identical to SEQ ID NO: 825
  REGION 1..120: note = Description of Artificial Sequence: Synthetic Antibody variable domain

SEQ ID NO: 7329 - protein, 112 aa, synthetic construct; identical to SEQ ID NO: 826
  REGION 1..112: note = Description of Artificial Sequence: Synthetic Antibody variable domain

SEQ ID NO: 7330 - protein, 119 aa, synthetic construct; identical to SEQ ID NO: 827
  REGION 1..119: note = Description of Artificial Sequence: Synthetic Antibody variable domain

SEQ ID NO: 7331 - protein, 113 aa, synthetic construct; identical to SEQ ID NO: 828
  REGION 1..113: note = Description of Artificial Sequence: Synthetic Antibody variable domain

SEQ ID NO: 7332 - protein, 119 aa, synthetic construct; identical to SEQ ID NO: 829
  REGION 1..119: note = Description of Artificial Sequence: Synthetic Antibody variable domain

SEQ ID NO: 7333 - protein, 113 aa, synthetic construct; identical to SEQ ID NO: 830
  REGION 1..113: note = Description of Artificial Sequence: Synthetic Antibody variable domain

SEQ ID NO: 7334 - protein, 119 aa, synthetic construct; identical to SEQ ID NO: 831
  REGION 1..119: note = Description of Artificial Sequence: Synthetic Antibody variable domain

SEQ ID NO: 7335 - protein, 113 aa, synthetic construct; identical to SEQ ID NO: 832
  REGION 1..113: note = Description of Artificial Sequence: Synthetic Antibody variable domain

SEQ ID NO: 7336 - protein, 119 aa, synthetic construct; identical to SEQ ID NO: 833
  REGION 1..119: note = Description of Artificial Sequence: Synthetic Antibody variable domain

SEQ ID NO: 7337 - protein, 113 aa, synthetic construct; identical to SEQ ID NO: 834
  REGION 1..113: note = Description of Artificial Sequence: Synthetic Antibody variable domain

SEQ ID NO: 7338 - protein, 120 aa, synthetic construct; identical to SEQ ID NO: 835
  REGION 1..120: note = Description of Artificial Sequence: Synthetic Antibody variable domain

SEQ ID NO: 7339 - protein, 112 aa, synthetic construct; identical to SEQ ID NO: 836
  REGION 1..112: note = Description of Artificial Sequence: Synthetic Antibody variable domain

SEQ ID NO: 7340 - protein, 120 aa, synthetic construct; identical to SEQ ID NO: 837
  REGION 1..120: note = Description of Artificial Sequence: Synthetic Antibody variable domain

SEQ ID NO: 7341 - protein, 112 aa, synthetic construct; identical to SEQ ID NO: 838
  REGION 1..112: note = Description of Artificial Sequence: Synthetic Antibody variable domain

SEQ ID NO: 7342 - protein, 121 aa, synthetic construct; identical to SEQ ID NO: 839
  REGION 1..121: note = Description of Artificial Sequence: Synthetic Antibody variable domain

SEQ ID NO: 7343 - protein, 121 aa, synthetic construct; identical to SEQ ID NO: 840
  REGION 1..121: note = Description of Artificial Sequence: Synthetic Antibody variable domain

SEQ ID NO: 7344 - protein, 107 aa, synthetic construct; identical to SEQ ID NO: 4045
  REGION 1..107: note = Description of Artificial Sequence: Synthetic Antibody variable domain

SEQ ID NO: 7345 - protein, 119 aa, synthetic construct; identical to SEQ ID NO: 842
  REGION 1..119: note = Description of Artificial Sequence: Synthetic Antibody variable domain

SEQ ID NO: 7346 - protein, 113 aa, synthetic construct; identical to SEQ ID NO: 843
  REGION 1..113: note = Description of Artificial Sequence: Synthetic Antibody variable domain

SEQ ID NO: 7347 - protein, 240 aa, synthetic construct; identical to SEQ ID NO: 821
  REGION 1..240: note = Description of Artificial Sequence: Synthetic Antibody variable domain

SEQ ID NO: 7348 - protein, 462 aa, synthetic construct; identical to SEQ ID NO: 822
  REGION 1..462: note = Description of Artificial Sequence: Synthetic Antibody variable domain

SEQ ID NO: 7349 - protein, 239 aa, synthetic construct; identical to SEQ ID NO: 846
  REGION 1..239: note = Description of Artificial Sequence: Synthetic Antibody variable domain

SEQ ID NO: 7350 - protein, 595 aa, synthetic construct; identical to SEQ ID NO: 847
  REGION 1..595: note = Description of Artificial Sequence: Synthetic Antibody variable domain

SEQ ID NO: 7351 - protein, 105 aa, Homo sapiens; identical to SEQ ID NO: 801

SEQ ID NO: 7352 - protein, 102 aa, Homo sapiens; identical to SEQ ID NO: 802

SEQ ID NO: 7353 - protein, 569 aa, Homo sapiens; identical to SEQ ID NO: 850

SEQ ID NO: 7354 - protein, 219 aa, Homo sapiens; identical to SEQ ID NO: 851

SEQ ID NO: 7355 - protein, 240 aa, synthetic construct; identical to SEQ ID NO: 821
  REGION 1..240: note = Description of Artificial Sequence: Synthetic Antibody variable domain

SEQ ID NO: 7356 - protein, 462 aa, synthetic construct; identical to SEQ ID NO: 822
  REGION 1..462: note = Description of Artificial Sequence: Synthetic Antibody variable domain

SEQ ID NO: 7357 - protein, 113 aa, synthetic construct; identical to SEQ ID NO: 816
  REGION 1..113: note = Description of Artificial Sequence: Synthetic Antibody variable domain

SEQ ID NO: 7358 - protein, 113 aa, synthetic construct; identical to SEQ ID NO: 815
  REGION 1..113: note = Description of Artificial Sequence: Synthetic Antibody variable domain

SEQ ID NO: 7359 - protein, 240 aa, synthetic construct; identical to SEQ ID NO: 821
  REGION 1..240: note = Description of Artificial Sequence: Synthetic Antibody variable domain

SEQ ID NO: 7360 - protein, 462 aa, synthetic construct; identical to SEQ ID NO: 822
  REGION 1..462: note = Description of Artificial Sequence: Synthetic Antibody variable domain

SEQ ID NO: 7361 - protein, 137 aa, Mus musculus; identical to SEQ ID NO: 858

SEQ ID NO: 7362 - protein, 133 aa, Mus musculus; identical to SEQ ID NO: 859

SEQ ID NO: 7363 - protein, 112 aa, synthetic construct; identical to SEQ ID NO: 860
  REGION 1..112: note = Description of Artificial Sequence: Synthetic Antibody variable domain

SEQ ID NO: 7364 - protein, 119 aa, synthetic construct; identical to SEQ ID NO: 861
  REGION 1..119: note = Description of Artificial Sequence: Synthetic Antibody variable domain

SEQ ID NO: 7365 - protein, 112 aa, Mus musculus; identical to SEQ ID NO: 860

SEQ ID NO: 7366 - protein, 119 aa, Mus musculus; identical to SEQ ID NO: 861

SEQ ID NO: 7367 - protein, 112 aa, Mus musculus; identical to SEQ ID NO: 864

SEQ ID NO: 7368 - protein, 119 aa, Mus musculus; identical to SEQ ID NO: 861

SEQ ID NO: 7369 - protein, 112 aa, synthetic construct; identical to SEQ ID NO: 860
  REGION 1..112: note = Description of Artificial Sequence: Synthetic Antibody variable domain

SEQ ID NO: 7370 - protein, 119 aa, synthetic construct; identical to SEQ ID NO: 861
  REGION 1..119: note = Description of Artificial Sequence: Synthetic Antibody variable domain

SEQ ID NO: 7371 - protein, 115 aa, synthetic construct; identical to SEQ ID NO: 868
  REGION 1..115: note = Description of Artificial Sequence: Synthetic Antibody variable domain

SEQ ID NO: 7372 - protein, 108 aa, synthetic construct; identical to SEQ ID NO: 869
  REGION 1..108: note = Description of Artificial Sequence: Synthetic Antibody variable domain

SEQ ID NO: 7373 - protein, 115 aa, synthetic construct; identical to SEQ ID NO: 870
  REGION 1..115: note = Description of Artificial Sequence: Synthetic Antibody variable domain

SEQ ID NO: 7374 - protein, 111 aa, synthetic construct; identical to SEQ ID NO: 871
  REGION 1..111: note = Description of Artificial Sequence: Synthetic Antibody variable domain

SEQ ID NO: 7375 - protein, 518 aa, synthetic construct; identical to SEQ ID NO: 872
  REGION 1..518: note = Description of Artificial Sequence: Synthetic scFv

SEQ ID NO: 7376 - protein, 524 aa, synthetic construct; identical to SEQ ID NO: 873
  REGION 1..524: note = Description of Artificial Sequence: Synthetic scFv

SEQ ID NO: 7377 - protein, 248 aa, synthetic construct; identical to SEQ ID NO: 874
  REGION 1..248: note = Description of Artificial Sequence: Synthetic scFv

SEQ ID NO: 7378 - protein, 225 aa, synthetic construct; identical to SEQ ID NO: 875
  REGION 1..225: note = Description of Artificial Sequence: Synthetic scFv

SEQ ID NO: 7379 - protein, 244 aa, synthetic construct; identical to SEQ ID NO: 876
  REGION 1..244: note = Description of Artificial Sequence: Synthetic scFv

SEQ ID NO: 7380 - protein, 230 aa, synthetic construct; identical to SEQ ID NO: 877
  REGION 1..230: note = Description of Artificial Sequence: Synthetic scFv

SEQ ID NO: 7381 - protein, 241 aa, synthetic construct; identical to SEQ ID NO: 878
  REGION 1..241: note = Description of Artificial Sequence: Synthetic scFv

SEQ ID NO: 7382 - protein, 249 aa, synthetic construct; identical to SEQ ID NO: 879
  REGION 1..249: note = Description of Artificial Sequence: Synthetic scFv

SEQ ID NO: 7383 - protein, 244 aa, synthetic construct; identical to SEQ ID NO: 880
  REGION 1..244: note = Description of Artificial Sequence: Synthetic scFv

SEQ ID NO: 7384 - protein, 243 aa, synthetic construct; identical to SEQ ID NO: 881
  REGION 1..243: note = Description of Artificial Sequence: Synthetic scFv

SEQ ID NO: 7385 - protein, 241 aa, synthetic construct; identical to SEQ ID NO: 882
  REGION 1..241: note = Description of Artificial Sequence: Synthetic scFv

SEQ ID NO: 7386 - protein, 239 aa, synthetic construct; identical to SEQ ID NO: 883
  REGION 1..239: note = Description of Artificial Sequence: Synthetic scFv

SEQ ID NO: 7387 - protein, 239 aa, synthetic construct; identical to SEQ ID NO: 884
  REGION 1..239: note = Description of Artificial Sequence: Synthetic scFv

SEQ ID NO: 7388 - protein, 239 aa, synthetic construct; identical to SEQ ID NO: 885
  REGION 1..239: note = Description of Artificial Sequence: Synthetic scFv

SEQ ID NO: 7389 - protein, 239 aa, synthetic construct; identical to SEQ ID NO: 886
  REGION 1..239: note = Description of Artificial Sequence: Synthetic scFv

SEQ ID NO: 7390 - protein, 239 aa, synthetic construct; identical to SEQ ID NO: 887
  REGION 1..239: note = Description of Artificial Sequence: Synthetic scFv

SEQ ID NO: 7391 - protein, 239 aa, synthetic construct; identical to SEQ ID NO: 888
  REGION 1..239: note = Description of Artificial Sequence: Synthetic scFv

SEQ ID NO: 7392 - protein, 239 aa, synthetic construct; identical to SEQ ID NO: 889
  REGION 1..239: note = Description of Artificial Sequence: Synthetic scFv

SEQ ID NO: 7393 - protein, 239 aa, synthetic construct; identical to SEQ ID NO: 890
  REGION 1..239: note = Description of Artificial Sequence: Synthetic scFv

SEQ ID NO: 7394 - protein, 239 aa, synthetic construct; identical to SEQ ID NO: 891
  REGION 1..239: note = Description of Artificial Sequence: Synthetic scFv

SEQ ID NO: 7395 - protein, 239 aa, synthetic construct; identical to SEQ ID NO: 892
  REGION 1..239: note = Description of Artificial Sequence: Synthetic scFv

SEQ ID NO: 7396 - protein, 239 aa, synthetic construct; identical to SEQ ID NO: 893
  REGION 1..239: note = Description of Artificial Sequence: Synthetic scFv

SEQ ID NO: 7397 - protein, 239 aa, synthetic construct; identical to SEQ ID NO: 894
  REGION 1..239: note = Description of Artificial Sequence: Synthetic scFv

SEQ ID NO: 7398 - protein, 239 aa, synthetic construct; identical to SEQ ID NO: 895
  REGION 1..239: note = Description of Artificial Sequence: Synthetic scFv

SEQ ID NO: 7399 - protein, 239 aa, synthetic construct; identical to SEQ ID NO: 896
  REGION 1..239: note = Description of Artificial Sequence: Synthetic scFv

SEQ ID NO: 7400 - protein, 100 aa, synthetic construct; identical to SEQ ID NO: 897
  REGION 1..100: note = Description of Artificial Sequence: Synthetic scFv

SEQ ID NO: 7401 - protein, 139 aa, synthetic construct; identical to SEQ ID NO: 898
  REGION 1..139: note = Description of Artificial Sequence: Synthetic scFv

SEQ ID NO: 7402 - protein, 243 aa, synthetic construct; identical to SEQ ID NO: 899
  REGION 1..243: note = Description of Artificial Sequence: Synthetic scFv

SEQ ID NO: 7403 - protein, 242 aa, synthetic construct; identical to SEQ ID NO: 900
  REGION 1..242: note = Description of Artificial Sequence: Synthetic scFv

SEQ ID NO: 7404 - protein, 115 aa, synthetic construct; identical to SEQ ID NO: 901
  REGION 1..115: note = Description of Artificial Sequence: Synthetic Antibody variable domain

SEQ ID NO: 7405 - protein, 111 aa, synthetic construct; identical to SEQ ID NO: 902
  REGION 1..111: note = Description of Artificial Sequence: Synthetic Antibody variable domain

SEQ ID NO: 7406 - protein, 117 aa, synthetic construct; identical to SEQ ID NO: 903
  REGION 1..117: note = Description of Artificial Sequence: Synthetic Antibody variable domain

SEQ ID NO: 7407 - protein, 228 aa, synthetic construct; identical to SEQ ID NO: 904
  REGION 1..228: note = Description of Artificial Sequence: Synthetic Antibody variable domain

SEQ ID NO: 7408 - protein, 120 aa, synthetic construct; identical to SEQ ID NO: 905
  REGION 1..120: note = Description of Artificial Sequence: Synthetic Antibody variable domain

SEQ ID NO: 7409 - protein, 115 aa, synthetic construct; identical to SEQ ID NO: 906
  REGION 1..115: note = Description of Artificial Sequence: Synthetic Antibody variable domain

SEQ ID NO: 7410 - protein, 118 aa, synthetic construct; identical to SEQ ID NO: 907
  REGION 1..118: note = Description of Artificial Sequence: Synthetic Antibody variable domain

SEQ ID NO: 7411 - protein, 113 aa, synthetic construct; identical to SEQ ID NO: 908
  REGION 1..113: note = Description of Artificial Sequence: Synthetic Antibody variable domain

SEQ ID NO: 7412 - protein, 119 aa, synthetic construct; identical to SEQ ID NO: 909
  REGION 1..119: note = Description of Artificial Sequence: Synthetic Antibody variable domain

SEQ ID NO: 7413 - protein, 112 aa, synthetic construct; identical to SEQ ID NO: 910
  REGION 1..112: note = Description of Artificial Sequence: Synthetic Antibody variable domain

SEQ ID NO: 7414 - protein, 119 aa, synthetic construct; identical to SEQ ID NO: 911
  REGION 1..119: note = Description of Artificial Sequence: Synthetic Antibody variable domain

SEQ ID NO: 7415 - protein, 112 aa, synthetic construct; identical to SEQ ID NO: 912
  REGION 1..112: note = Description of Artificial Sequence: Synthetic Antibody variable domain

SEQ ID NO: 7416 - protein, 117 aa, synthetic construct; identical to SEQ ID NO: 913
  REGION 1..117: note = Description of Artificial Sequence: Synthetic Antibody variable domain

SEQ ID NO: 7417 - protein, 111 aa, synthetic construct; identical to SEQ ID NO: 914
  REGION 1..111: note = Description of Artificial Sequence: Synthetic Antibody variable domain

SEQ ID NO: 7418 - protein, 117 aa, synthetic construct; identical to SEQ ID NO: 915
  REGION 1..117: note = Description of Artificial Sequence: Synthetic Antibody variable domain

SEQ ID NO: 7419 - protein, 111 aa, synthetic construct; identical to SEQ ID NO: 916
  REGION 1..111: note = Description of Artificial Sequence: Synthetic Antibody variable domain

SEQ ID NO: 7420 - protein, 120 aa, synthetic construct [sequence omitted]

SEQ ID NO: 7421 - protein, 107 aa, synthetic construct [sequence omitted]

SEQ ID NO: 7422 - protein, 109 aa, synthetic construct; identical to SEQ ID NO: 919
  REGION 1..109: note = Description of Artificial Sequence: Synthetic Antibody variable domain

SEQ ID NO: 7423 - protein, 120 aa, synthetic construct; identical to SEQ ID NO: 920
  REGION 1..120: note = Description of Artificial Sequence: Synthetic Antibody variable domain

SEQ ID NO: 7424 - protein, 109 aa, synthetic construct; identical to SEQ ID NO: 921
  REGION 1..109: note = Description of Artificial Sequence: Synthetic Antibody variable domain

SEQ ID NO: 7425 - protein, 120 aa, synthetic construct; identical to SEQ ID NO: 922
  REGION 1..120: note = Description of Artificial Sequence: Synthetic Antibody variable domain

SEQ ID NO: 7426 - protein, 109 aa, synthetic construct; identical to SEQ ID NO: 923
  REGION 1..109: note = Description of Artificial Sequence: Synthetic Antibody variable domain

SEQ ID NO: 7427 - protein, 120 aa, synthetic construct; identical to SEQ ID NO: 924
  REGION 1..120: note = Description of Artificial Sequence: Synthetic Antibody variable domain

SEQ ID NO: 7428 - protein, 20 aa, synthetic construct
  REGION 1..20: note = Description of Artificial Sequence: Synthetic Antibody variable domain
EVQLVESGGGLVQPKGSLKL

SEQ ID NO: 7429 - protein, 20 aa, synthetic construct
  REGION 1..20: note = Description of Artificial Sequence: Synthetic Antibody variable domain
DIVMTQSQKFMSTSVVDRIS

SEQ ID NO: 7430 - protein, 107 aa, Mus musculus; identical to SEQ ID NO: 927

SEQ ID NO: 7431 - protein, 119 aa, Mus musculus; identical to SEQ ID NO: 928

SEQ ID NO: 7432 - protein, 107 aa, synthetic construct [sequence omitted]

SEQ ID NO: 7433 - protein, 119 aa, synthetic construct [sequence omitted]

SEQ ID NO: 7434 - protein, 107 aa, synthetic construct; identical to SEQ ID NO: 931
  REGION 1..107: note = Description of Artificial Sequence: Synthetic Antibody variable domain

SEQ ID NO: 7435 - protein, 119 aa, synthetic construct; identical to SEQ ID NO: 932
  REGION 1..119: note = Description of Artificial Sequence: Synthetic Antibody variable domain

SEQ ID NO: 7436 - protein, 214 aa, synthetic construct; identical to SEQ ID NO: 933
  REGION 1..214: note = Description of Artificial Sequence: Synthetic Antibody variable domain

SEQ ID NO: 7437 - protein, 448 aa, synthetic construct; identical to SEQ ID NO: 934
  REGION 1..448: note = Description of Artificial Sequence: Synthetic Antibody variable domain

SEQ ID NO: 7438 - protein, 214 aa, synthetic construct; identical to SEQ ID NO: 935
  REGION 1..214: note = Description of Artificial Sequence: Synthetic Antibody variable domain

SEQ ID NO: 7439 - protein, 449 aa, synthetic construct; identical to SEQ ID NO: 936
  REGION 1..449: note = Description of Artificial Sequence: Synthetic Antibody variable domain

SEQ ID NO: 7440 - protein, 217 aa, synthetic construct; identical to SEQ ID NO: 937
  REGION 1..217: note = Description of Artificial Sequence: Synthetic Antibody variable domain

SEQ ID NO: 7441 - protein, 449 aa, synthetic construct; identical to SEQ ID NO: 938
  REGION 1..449: note = Description of Artificial Sequence: Synthetic Antibody variable domain

SEQ ID NO: 7442 - protein, 124 aa, Homo sapiens; identical to SEQ ID NO: 939

SEQ ID NO: 7443 - protein, 107 aa, Homo sapiens; identical to SEQ ID NO: 940

SEQ ID NO: 7444 - protein, 122 aa, Homo sapiens; identical to SEQ ID NO: 941

SEQ ID NO: 7445 - protein, 107 aa, Homo sapiens; identical to SEQ ID NO: 942

SEQ ID NO: 7446 - protein, 122 aa, Homo sapiens; identical to SEQ ID NO: 943

SEQ ID NO: 7447 - protein, 108 aa, Homo sapiens; identical to SEQ ID NO: 944

SEQ ID NO: 7448 - protein, 109 aa, synthetic construct; identical to SEQ ID NO: 945
  REGION 1..109: note = Description of Artificial Sequence: Synthetic Antibody variable domain

SEQ ID NO: 7449 - protein, 109 aa, synthetic construct; identical to SEQ ID NO: 946
  REGION 1..109: note = Description of Artificial Sequence: Synthetic Antibody variable domain

SEQ ID NO: 7450 - protein, 109 aa, synthetic construct; identical to SEQ ID NO: 947
  REGION 1..109: note = Description of Artificial Sequence: Synthetic Antibody variable domain

SEQ ID NO: 7451 - protein, 228 aa, synthetic construct; identical to SEQ ID NO: 948
  REGION 1..228: note = Description of Artificial Sequence: Synthetic Antibody variable domain

SEQ ID NO: 7452 - protein, 109 aa, Homo sapiens; identical to SEQ ID NO: 949

SEQ ID NO: 7453 - protein, 142 aa, synthetic construct; identical to SEQ ID NO: 950
  REGION 1..142: note = Description of Artificial Sequence: Synthetic Antibody variable domain

SEQ ID NO: 7454 - protein, 130 aa, synthetic construct; identical to SEQ ID NO: 951
  REGION 1..130: note = Description of Artificial Sequence: Synthetic Antibody variable domain

SEQ ID NO: 7455 - protein, 472 aa, synthetic construct; identical to SEQ ID NO: 952
  REGION 1..472: note = Description of Artificial Sequence: Synthetic Antibody variable domain

SEQ ID NO: 7456 - protein, 236 aa, synthetic construct; identical to SEQ ID NO: 953
  REGION 1..236: note = Description of Artificial Sequence: Synthetic Antibody variable domain

SEQ ID NO: 7457 - protein, 628 aa, synthetic construct; identical to SEQ ID NO: 954
  REGION 1..628: note = Description of Artificial Sequence: Synthetic Antibody variable domain

SEQ ID NO: 7458 - protein, 643 aa, synthetic construct; identical to SEQ ID NO: 955
  REGION 1..643: note = Description of Artificial Sequence: Synthetic Antibody variable domain

SEQ ID NO: 7459 - protein, 214 aa, Mus musculus; identical to SEQ ID NO: 956

SEQ ID NO: 7460 - protein, 220 aa, Mus musculus; identical to SEQ ID NO: 957

SEQ ID NO: 7461 - protein, 233 aa, synthetic construct; identical to SEQ ID NO: 958
  REGION 1..233: note = Description of Artificial Sequence: Synthetic Antibody variable domain

SEQ ID NO: 7462 - protein, 467 aa, synthetic construct; identical to SEQ ID NO: 959
  REGION 1..467: note = Description of Artificial Sequence: Synthetic Antibody variable domain

SEQ ID NO: 7463 - protein, 219 aa, synthetic construct; identical to SEQ ID NO: 960
  REGION 1..219: note = Description of Artificial Sequence: Synthetic Antibody variable domain

SEQ ID NO: 7464 - protein, 234 aa, synthetic construct; identical to SEQ ID NO: 961
  REGION 1..234: note = Description of Artificial Sequence: Synthetic Antibody variable domain

SEQ ID NO: 7465 - protein, 450 aa, synthetic construct; identical to SEQ ID NO: 962
  REGION 1..450: note = Description of Artificial Sequence: Synthetic Antibody variable domain

SEQ ID NO: 7466 - protein, 450 aa, synthetic construct; identical to SEQ ID NO: 963
  REGION 1..450: note = Description of Artificial Sequence: Synthetic Antibody variable domain

SEQ ID NO: 7467 - protein, 214 aa, synthetic construct; identical to SEQ ID NO: 964
  REGION 1..214: note = Description of Artificial Sequence: Synthetic Antibody variable domain

SEQ ID NO: 7468 - protein, 129 aa, synthetic construct; identical to SEQ ID NO: 965
  REGION 1..129: note = Description of Artificial Sequence: Synthetic Antibody variable domain

SEQ ID NO: 7469 - protein, 111 aa, synthetic construct; identical to SEQ ID NO: 966
  REGION 1..111: note = Description of Artificial Sequence: Synthetic Antibody variable domain

SEQ ID NO: 7470 - protein, 121 aa, synthetic construct; identical to SEQ ID NO: 967
  REGION 1..121: note = Description of Artificial Sequence: Synthetic Antibody variable domain

SEQ ID NO: 7471 - protein, 107 aa, synthetic construct; identical to SEQ ID NO: 968
  REGION 1..107: note = Description of Artificial Sequence: Synthetic Antibody variable domain

SEQ ID NO: 7472 - protein, 451 aa, synthetic construct; identical to SEQ ID NO: 969
  REGION 1..451: note = Description of Artificial Sequence: Synthetic Antibody variable domain

SEQ ID NO: 7473 - protein, 469 aa, synthetic construct; identical to SEQ ID NO: 970
  REGION 1..469: note = Description of Artificial Sequence: Synthetic Antibody variable domain

SEQ ID NO: 7474 - protein, 233 aa, synthetic construct; identical to SEQ ID NO: 971
  REGION 1..233: note = Description of Artificial Sequence: Synthetic Antibody variable domain

SEQ ID NO: 7475 - protein, 450 aa, synthetic construct; identical to SEQ ID NO: 972
  REGION 1..450: note = Description of Artificial Sequence: Synthetic Antibody variable domain

SEQ ID NO: 7476 - protein, 263 aa, synthetic construct; identical to SEQ ID NO: 973
  REGION 1..263: note = Description of Artificial Sequence: Synthetic scFv

SEQ ID NO: 7477 - protein, 242 aa, synthetic construct; identical to SEQ ID NO: 974
  REGION 1..242: note = Description of Artificial Sequence: Synthetic scFv

SEQ ID NO: 7478 - protein, 477 aa, synthetic construct; identical to SEQ ID NO: 975
  REGION 1..477: note = Description of Artificial Sequence: Synthetic scFv

SEQ ID NO: 7479 - protein, 291 aa, synthetic construct; identical to SEQ ID NO: 976
  REGION 1..291: note = Description of Artificial Sequence: Synthetic scFv

SEQ ID NO: 7480 - protein, 291 aa, synthetic construct; identical to SEQ ID NO: 977
  REGION 1..291: note = Description of Artificial Sequence: Synthetic scFv

SEQ ID NO: 7481 - protein, 665 aa, synthetic construct; identical to SEQ ID NO: 978
  REGION 1..665: note = Description of Artificial Sequence: Synthetic scFv

SEQ ID NO: 7482 - protein, 278 aa, synthetic construct; identical to SEQ ID NO: 979
  REGION 1..278: note = Description of Artificial Sequence: Synthetic scFv

SEQ ID NO: 7483 - protein, 280 aa, synthetic construct; identical to SEQ ID NO: 980
  REGION 1..280: note = Description of Artificial Sequence: Synthetic scFv

SEQ ID NO: 7484 - protein, 114 aa, Homo sapiens; identical to SEQ ID NO: 480

SEQ ID NO: 7485 - protein, 98 aa, Homo sapiens; identical to SEQ ID NO: 481

SEQ ID NO: 7486 - protein, 112 aa, Homo sapiens; identical to SEQ ID NO: 482

SEQ ID NO: 7487 - protein, 173 aa, Homo sapiens; identical to SEQ ID NO: 483

SEQ ID NO: 7488 - protein, 113 aa, Homo sapiens; identical to SEQ ID NO: 484

SEQ ID NO: 7489 - protein, 60 aa, Homo sapiens; identical to SEQ ID NO: 485

SEQ ID NO: 7490 - protein, 114 aa, Homo sapiens; identical to SEQ ID NO: 486

SEQ ID NO: 7491 - protein, 113 aa, Homo sapiens; identical to SEQ ID NO: 487

SEQ ID NO: 7492 - protein, 22 aa, Homo sapiens
EGLYNELQKDKMAEAYSEIGMK

SEQ ID NO: 7493 - protein, 112 aa, Homo sapiens; identical to SEQ ID NO: 419

SEQ ID NO: 7494 - protein, 110 aa, Homo sapiens; identical to SEQ ID NO: 493

SEQ ID NO: 7495 - protein, 137 aa, Homo sapiens; identical to SEQ ID NO: 494

SEQ ID NO: 7496 - protein, 163 aa, Homo sapiens; identical to SEQ ID NO: 472

SEQ ID NO: 7497 - protein, 38 aa, Homo sapiens; identical to SEQ ID NO: 496

SEQ ID NO: 7498 - protein, 226 aa, Homo sapiens; identical to SEQ ID NO: 497

SEQ ID NO: 7499 - protein, 188 aa, Homo sapiens; identical to SEQ ID NO: 498

SEQ ID NO: 7500 - protein, 21 aa, Homo sapiens
ENLYEGLNLDDCSMYEDISRG

SEQ ID NO: 7501 - protein, 84 aa, Homo sapiens; identical to SEQ ID NO: 501

SEQ ID NO: 7502 - protein, 84 aa, Homo sapiens; identical to SEQ ID NO: 502

SEQ ID NO: 7503 - protein, 47 aa, Homo sapiens; identical to SEQ ID NO: 503

SEQ ID NO: 7504 - protein, 41 aa, Homo sapiens; identical to SEQ ID NO: 504

SEQ ID NO: 7505 - protein, 47 aa, Homo sapiens; identical to SEQ ID NO: 505

SEQ ID NO: 7506 - protein, 20 aa, Homo sapiens
RPRRSPAQDGKVYINMPGRG

SEQ ID NO: 7507 - protein, 113 aa, Homo sapiens; identical to SEQ ID NO: 507

SEQ ID NO: 7508 - protein, 112 aa, Homo sapiens; identical to SEQ ID NO: 508

SEQ ID NO: 7509 - protein, 102 aa, Homo sapiens; identical to SEQ ID NO: 509

SEQ ID NO: 7510 - protein, 101 aa, Homo sapiens; identical to SEQ ID NO: 510

SEQ ID NO: 7511 - protein, 113 aa, Homo sapiens; identical to SEQ ID NO: 507

SEQ ID NO: 7512 - protein, 112 aa, Homo sapiens; identical to SEQ ID NO: 508

SEQ ID NO: 7513 - protein, 102 aa, Homo sapiens; identical to SEQ ID NO: 509

SEQ ID NO: 7514 - protein, 101 aa, Homo sapiens; identical to SEQ ID NO: 510

SEQ ID NO: 7515 - protein, 21 aa, Homo sapiens
ESPYQELQGQRSDVYSDLNTQ

SEQ ID NO: 7516 - protein, 49 aa, Homo sapiens; identical to SEQ ID NO: 517

SEQ ID NO: 7517 - protein, 35 aa, Homo sapiens; identical to SEQ ID NO: 518

SEQ ID NO: 7518 - protein, 39 aa, Homo sapiens; identical to SEQ ID NO: 519

SEQ ID NO: 7519 - protein, 149 aa, Homo sapiens; identical to SEQ ID NO: 520

SEQ ID NO: 7520 - protein, 619 aa, Homo sapiens; identical to SEQ ID NO: 521

SEQ ID NO: 7521 - protein, 180 aa, Homo sapiens; identical to SEQ ID NO: 522

SEQ ID NO: 7522 - protein, 240 aa, Homo sapiens; identical to SEQ ID NO: 523

SEQ ID NO: 7523 - protein, 86 aa, Homo sapiens; identical to SEQ ID NO: 524

SEQ ID NO: 7524 - protein, 21 aa, Homo sapiens
DGVYTGLSTRNQETYETLKHE

SEQ ID NO: 7525 - protein, 66 aa, Homo sapiens; identical to SEQ ID NO: 526

SEQ ID NO: 7526 - protein, 40 aa, synthetic construct; identical to SEQ ID NO: 451
  REGION 1..40: note = Description of Artificial Sequence: Synthetic polypeptide

SEQ ID NO: 7527 - protein, 67 aa, Homo sapiens; identical to SEQ ID NO: 1024

SEQ ID NO: 7528 - protein, 84 aa, Homo sapiens; identical to SEQ ID NO: 501

SEQ ID NO: 7529 - protein, 219 aa, synthetic construct; identical to SEQ ID NO: 1026
  REGION 1..219: note = Description of Artificial Sequence: Synthetic polypeptide

SEQ ID NO: 7530 - protein, 283 aa, synthetic construct; identical to SEQ ID NO: 1027
  REGION 1..283: note = Description of Artificial Sequence: Synthetic polypeptide

SEQ ID NO: 7531 - protein, 46 aa, Homo sapiens; identical to SEQ ID NO: 528

SEQ ID NO: 7532 - protein, 31 aa, Homo sapiens; identical to SEQ ID NO: 529

SEQ ID NO: 7533 - protein, 27 aa, Homo sapiens
IISFFLALTSTALLFLLFFLTLRFSVV

SEQ ID NO: 7534 - protein, 26 aa, Homo sapiens
VAAILGLGLVLGLLGPLAILLALYLL

SEQ ID NO: 7535 - protein, 363 aa, Homo sapiens; identical to SEQ ID NO: 532

SEQ ID NO: 7536 - protein, 21 aa, Homo sapiens
AVFGCIFGALVIVTVGGFIFW

SEQ ID NO: 7537 - protein, 185 aa, Homo sapiens; identical to SEQ ID NO: 534

SEQ ID NO: 7538 - protein, 106 aa, Homo sapiens; identical to SEQ ID NO: 535

SEQ ID NO: 7539 - protein, 27 aa, Homo sapiens
FWVLVVVGGVLACYSLLVTVAFIIFWV

SEQ ID NO: 7540 - protein, 66 aa, Homo sapiens; identical to SEQ ID NO: 537

SEQ ID NO: 7541 - protein, 33 aa, Homo sapiens; identical to SEQ ID NO: 538

SEQ ID NO: 7542 - protein, 68 aa, Homo sapiens; identical to SEQ ID NO: 449

SEQ ID NO: 7543 - protein, 28 aa, Homo sapiens
MFWVLVVVGGVLACYSLLVTVAFIIFWV

SEQ ID NO: 7544 - protein, 26 aa, Homo sapiens
FWVLVVVGGVLACYSLLVTVAFHFWV

SEQ ID NO: 7545 - protein, 28 aa, Homo sapiens
MFWVLVVVGGVLACYSGGVTVAFIIFWV

SEQ ID NO: 7546 - protein, 26 aa, Homo sapiens
WVLVVVGGVLACYSLLVTVAFIIFWV

SEQ ID NO: 7547 - protein, 69 aa, Homo sapiens; identical to SEQ ID NO: 544

SEQ ID NO: 7548 - protein, 180 aa, Homo sapiens; identical to SEQ ID NO: 545

SEQ ID NO: 7549 - protein, 216 aa, Homo sapiens; identical to SEQ ID NO: 546

SEQ ID NO: 7550 - protein, 140 aa, Homo sapiens; identical to SEQ ID NO: 547

SEQ ID NO: 7551 - protein, 222 aa, Homo sapiens; identical to SEQ ID NO: 454

SEQ ID NO: 7552 - protein, 23 aa, Homo sapiens
LCYLLDGILFIYGVILTALFLRV

SEQ ID NO: 7553 - protein, 51 aa, Homo sapiens; identical to SEQ ID NO: 550

SEQ ID NO: 7554 - protein, 21 aa, Homo sapiens
LCYLLDGILFIYGVILTALFL

SEQ ID NO: 7555 - protein, 25 aa, Homo sapiens
ALIVLGGVAGLLLFIGLGIFFCVRC

SEQ ID NO: 7556 - protein, 22 aa, Homo sapiens
MALIVLGGVAGLLLFIGLGIFF

SEQ ID NO: 7557 - protein, 725 aa, Homo sapiens; identical to SEQ ID NO: 554

SEQ ID NO: 7558 - protein, 23 aa, Homo sapiens
PLFIPVAVMVTAFSGLAFIIWLA

SEQ ID NO: 7559 - protein, 24 aa, Homo sapiens
ALPAALAVISFLLGLGLGVACVLA

SEQ ID NO: 7560 - protein, 21 aa, Homo sapiens
MALPVTALLLPLALLLHAARP

SEQ ID NO: 7561 - protein, 286 aa, Homo sapiens; identical to SEQ ID NO: 558

SEQ ID NO: 7562 - protein, 226 aa, Homo sapiens; identical to SEQ ID NO: 559

SEQ ID NO: 7563 - protein, 83 aa, Homo sapiens; identical to SEQ ID NO: 560

SEQ ID NO: 7564 - protein, 22 aa, Homo sapiens
IWAPLAGTCGVLLLSLVITLYC

SEQ ID NO: 7565 - protein, 24 aa, Homo sapiens
IYIWAPLAGTCGVLLLSLVITLYC

SEQ ID NO: 7566 - protein, 25 aa, Homo sapiens
IYIWAPLAGTCGVLLLSLVITLYCR

SEQ ID NO: 7567 - protein, 25 aa, Homo sapiens
IYIWAPLAGTCGVLLLSLVITLVCR

SEQ ID NO: 7568 - protein, 21 aa, Homo sapiens
IYIWAPLAGTCGVLLLSLVIT

SEQ ID NO: 7569 - protein, 23 aa, Homo sapiens
IYIWAPLAGTCGVLLLSLVITLY

SEQ ID NO: 7570 - protein, 23 aa, Homo sapiens
LGLLVAGVLVLLVSLGVAIHLCC

SEQ ID NO: 7571 - protein, 101 aa, Homo sapiens; identical to SEQ ID NO: 568

SEQ ID NO: 7572 - protein, 257 aa, Homo sapiens; identical to SEQ ID NO: 570

SEQ ID NO: 7573 - protein, 54 aa, Homo sapiens; identical to SEQ ID NO: 573

SEQ ID NO: 7574 - protein, 31 aa, Homo sapiens; identical to SEQ ID NO: 574

SEQ ID NO: 7575 - protein, 24 aa, Homo sapiens
SIISAVVGILLVVVLGVVFGILII

SEQ ID NO: 7576 - protein, 113 aa, Homo sapiens; identical to SEQ ID NO: 576

SEQ ID NO: 7577 - protein, 21 aa, Homo sapiens
FWLPIGCAAFVVVCILGCILI

SEQ ID NO: 7578 - protein, 233 aa, Homo sapiens; identical to SEQ ID NO: 585

SEQ ID NO: 7579 - protein, 21 aa, Homo sapiens
VAAILGLGLVLGLLGPLAILL

SEQ ID NO: 7580 - protein, 24 aa, Homo sapiens
IYIWAPLAGTCGVLLLSLVITLYC

SEQ ID NO: 7581 - protein, 24 aa, Homo sapiens
IYIWAPLAGTCGVLLLSLVITLYC

SEQ ID NO: 7582 - protein, 5 aa, Homo sapiens
DKTHT

SEQ ID NO: 7583 - protein, 4 aa, Homo sapiens
CPPC

SEQ ID NO: 7584 - protein, 15 aa, Homo sapiens
CPEPKSCDTPPPCPR

SEQ ID NO: 7585 - protein, 12 aa, Homo sapiens
ELKTPLGDTTHT

SEQ ID NO: 7586 - protein, 10 aa, Homo sapiens
KSCDKTHTCP

SEQ ID NO: 7587 - protein, 16 aa, Homo sapiens
LDPKSSDKTHTCPPCP

SEQ ID NO: 7588 - protein, 39 aa, Homo sapiens; identical to SEQ ID NO: 599

SEQ ID NO: 7589 - protein, 12 aa, Homo sapiens
GGAVHTRGLDFA

SEQ ID NO: 7590 - protein, 45 aa, Homo sapiens; identical to SEQ ID NO: 601

SEQ ID NO: 7591 - protein, 48 aa, Homo sapiens; identical to SEQ ID NO: 602

SEQ ID NO: 7592 - protein, 79 aa, Homo sapiens; identical to SEQ ID NO: 605

SEQ ID NO: 7593 - protein, 51 aa, Homo sapiens; identical to SEQ ID NO: 606

SEQ ID NO: 7594 - protein, 69 aa, Homo sapiens; identical to SEQ ID NO: 607

SEQ ID NO: 7595 - protein, 44 aa, Homo sapiens; identical to SEQ ID NO: 608

SEQ ID NO: 7596 - protein, 47 aa, Homo sapiens; identical to SEQ ID NO: 609

SEQ ID NO: 7597 - protein, 11 aa, Homo sapiens
LDKTHTCPPCP

SEQ ID NO: 7598 - protein, 101 aa, Homo sapiens; identical to SEQ ID NO: 568

SEQ ID NO: 7599 - protein, 16 aa, Homo sapiens
GLAVSTISSFFPPGYQ

SEQ ID NO: 7600 - protein, 282 aa, Homo sapiens; identical to SEQ ID NO: 614

SEQ ID NO: 7601 - protein, 246 aa, Homo sapiens; identical to SEQ ID NO: 615

SEQ ID NO: 7602 - protein, 45 aa, Homo sapiens; identical to SEQ ID NO: 616

SEQ ID NO: 7603 - protein, 16 aa, Homo sapiens
LEPKSCDKTHTCPPCP

SEQ ID NO: 7604 - protein, 43 aa, Homo sapiens; identical to SEQ ID NO: 618

SEQ ID NO: 7605 - protein, 16 aa, Homo sapiens
ELKTPLGDTHTCPRCP

SEQ ID NO: 7606 - protein, 15 aa, Homo sapiens
EPKSCDTPPPCPRCP

SEQ ID NO: 7607 - protein, 12 aa, Homo sapiens
ESKYGPPCPSCP

SEQ ID NO: 7608 - protein, 12 aa, Homo sapiens
ERKCCVECPPCP

SEQ ID NO: 7609 - protein, 229 aa, Homo sapiens; identical to SEQ ID NO: 624

SEQ ID NO: 7610 - protein, 119 aa, Homo sapiens; identical to SEQ ID NO: 625

SEQ ID NO: 7611 - protein, 282 aa, Homo sapiens; identical to SEQ ID NO: 614

SEQ ID NO: 7612 - protein, 281 aa, Homo sapiens; identical to SEQ ID NO: 627

SEQ ID NO: 7613 - protein, 283 aa, Homo sapiens; identical to SEQ ID NO: 628

SEQ ID NO: 7614 - protein, 58 aa, Homo sapiens; identical to SEQ ID NO: 629

SEQ ID NO: 7615 - protein, 282 aa, Homo sapiens; identical to SEQ ID NO: 614

SEQ ID NO: 7616 - protein, 282 aa, Homo sapiens; identical to SEQ ID NO: 614

SEQ ID NO: 7617 - protein, 281 aa, Homo sapiens; identical to SEQ ID NO: 1117

SEQ ID NO: 7618 - protein, 282 aa, Homo sapiens; identical to SEQ ID NO: 614

SEQ ID NO: 7619 - protein, 234 aa, Homo sapiens; identical to SEQ ID NO: 635

SEQ ID NO: 7620 - protein, 20 aa, Homo sapiens
AEPKSPDKTHTCPPCPKDPK

SEQ ID NO: 7621 - protein, 233 aa, Homo sapiens; identical to SEQ ID NO: 638

SEQ ID NO: 7622 - protein, 13 aa, Homo sapiens
SVFLFPPKPKDTL

SEQ ID NO: 7623 - protein, 231 aa, Homo sapiens; identical to SEQ ID NO: 640

SEQ ID NO: 7624 - protein, 235 aa, Homo sapiens; identical to SEQ ID NO: 641

SEQ ID NO: 7625 - protein, 223 aa, Homo sapiens; identical to SEQ ID NO: 642

SEQ ID NO: 7626 - protein, 235 aa, Homo sapiens; identical to SEQ ID NO: 643

SEQ ID NO: 7627 - protein, 17 aa, Homo sapiens
ELKTPLGDTTHTCPRCP

SEQ ID NO: 7628 - protein, 61 aa, Homo sapiens; identical to SEQ ID NO: 646

SEQ ID NO: 7629 - protein, 230 aa, Homo sapiens; identical to SEQ ID NO: 647

SEQ ID NO: 7630 - protein, 230 aa, Homo sapiens; identical to SEQ ID NO: 648

SEQ ID NO: 7631 - protein, 12 aa, Homo sapiens
SPNMVPHAHHAQ

SEQ ID NO: 7632 - protein, 107 aa, Homo sapiens; identical to SEQ ID NO: 650

SEQ ID NO: 7633 - protein, 129 aa, Homo sapiens; identical to SEQ ID NO: 651

SEQ ID NO: 7634 - protein, 229 aa, Homo sapiens; identical to SEQ ID NO: 652

SEQ ID NO: 7635 - protein, 229 aa, Homo sapiens; identical to SEQ ID NO: 653

SEQ ID NO: 7636 - DNA, 36 bp, Homo sapiens; identical to SEQ ID NO: 655
  source 1..36: mol_type = other DNA

SEQ ID NO: 7637 - protein, 12 aa, Homo sapiens
ESKYGPPCPPCP

SEQ ID NO: 7638 - protein, 9 aa, Homo sapiens
YGPPCPPCP

SEQ ID NO: 7639 - protein, 10 aa, Homo sapiens
KYGPPCPPCP

SEQ ID NO: 7640 - protein, 13 aa, Homo sapiens
EVVKYGPPCPPCP

SEQ ID NO: 7641 - protein, 229 aa, Homo sapiens; identical to SEQ ID NO: 664

SEQ ID NO: 7642 - protein, 22 aa, Homo sapiens
ESKYGPPCPPCPGGGSSGGGSG

SEQ ID NO: 7643 - protein, 231 aa, Homo sapiens; identical to SEQ ID NO: 666

SEQ ID NO: 7644 - protein, 231 aa, Homo sapiens; identical to SEQ ID NO: 667

SEQ ID NO: 7645 - protein, 236 aa, Homo sapiens; identical to SEQ ID NO: 1145

SEQ ID NO: 7646 - protein, 268 aa, synthetic construct; identical to SEQ ID NO: 1146
  REGION 1..268: note = Description of Artificial Sequence: Synthetic Construct

SEQ ID NO: 7647 - protein, 153 aa, synthetic construct; identical to SEQ ID NO: 1147
  REGION 1..153: note = Description of Artificial Sequence: Synthetic Construct

SEQ ID NO: 7648 - protein, 319 aa, synthetic construct; identical to SEQ ID NO: 1148
  REGION 1..319: note = Description of Artificial Sequence: Synthetic Construct

SEQ ID NO: 7649 - protein, 528 aa, synthetic construct; identical to SEQ ID NO: 1149
  REGION 1..528: note = Description of Artificial Sequence: Synthetic Payload

SEQ ID NO: 7650 - protein, 579 aa, synthetic construct; identical to SEQ ID NO: 1150
  REGION 1..579: note = Description of Artificial Sequence: Synthetic Payload

SEQ ID NO: 7651 - protein, 607 aa, synthetic construct; identical to SEQ ID NO: 1151
  REGION 1..607: note = Description of Artificial Sequence: Synthetic Payload

SEQ ID NO: 7652 - protein, 607 aa, synthetic construct; identical to SEQ ID NO: 1152
  REGION 1..607: note = Description of Artificial Sequence: Synthetic Payload

SEQ ID NO: 7653 - protein, 607 aa, synthetic construct; identical to SEQ ID NO: 1153
  REGION 1..607: note = Description of Artificial Sequence: Synthetic Payload

SEQ ID NO: 7654 - protein, 413 aa, synthetic construct; identical to SEQ ID NO: 1154
  REGION 1..413: note = Description of Artificial Sequence: Synthetic Payload

SEQ ID NO: 7655 - protein, 525 aa, synthetic construct; identical to SEQ ID NO: 1155
  REGION 1..525: note = Description of Artificial Sequence: Synthetic Payload

SEQ ID NO: 7656 - protein, 576 aa, synthetic construct; identical to SEQ ID NO: 1156
  REGION 1..576: note = Description of Artificial Sequence: Synthetic Payload

SEQ ID NO: 7657 - protein, 576 aa, synthetic construct; identical to SEQ ID NO: 1157
  REGION 1..576: note = Description of Artificial Sequence: Synthetic Payload

SEQ ID NO: 7658 - protein, 431 aa, synthetic construct; identical to SEQ ID NO: 745
  REGION 1..431: note = Description of Artificial Sequence: Synthetic Payload

SEQ ID NO: 7659 - protein, 396 aa, synthetic construct; identical to SEQ ID NO: 747
  REGION 1..396: note = Description of Artificial Sequence: Synthetic Construct

SEQ ID NO: 7660 - protein, 543 aa, synthetic construct; identical to SEQ ID NO: 1160
  REGION 1..543: note = Description of Artificial Sequence: Synthetic Construct

SEQ ID NO: 7661 - protein, 594 aa, synthetic construct; identical to SEQ ID NO: 1161
  REGION 1..594: note = Description of Artificial Sequence: Synthetic Construct

SEQ ID NO: 7662 - protein, 540 aa, synthetic construct; identical to SEQ ID NO: 1162
  REGION 1..540: note = Description of Artificial Sequence: Synthetic Construct

SEQ ID NO: 7663 - protein, 591 aa, synthetic construct; identical to SEQ ID NO: 1163
  REGION 1..591: note = Description of Artificial Sequence: Synthetic Construct

SEQ ID NO: 7664 - protein, 505 aa, synthetic construct; identical to SEQ ID NO: 1164
  REGION 1..505: note = Description of Artificial Sequence: Synthetic Construct

SEQ ID NO: 7665 - protein, 556 aa, synthetic construct; identical to SEQ ID NO: 1165
  REGION 1..556: note = Description of Artificial Sequence: Synthetic Construct

SEQ ID NO: 7666 - protein, 505 aa, synthetic construct; identical to SEQ ID NO: 1166
  REGION 1..505: note = Description of Artificial Sequence: Synthetic Construct

SEQ ID NO: 7667 - protein, 556 aa, synthetic construct; identical to SEQ ID NO: 1167
  REGION 1..556: note = Description of Artificial Sequence: Synthetic Construct

SEQ ID NO: 7668 - protein, 490 aa, synthetic construct; identical to SEQ ID NO: 1168
  REGION 1..490: note = Description of Artificial Sequence: Synthetic Construct

SEQ ID NO: 7669 - protein, 599 aa, synthetic construct; identical to SEQ ID NO: 1169
  REGION 1..599: note = Description of Artificial Sequence: Synthetic Construct

SEQ ID NO: 7670 - protein, 650 aa, synthetic construct; identical to SEQ ID NO: 1170
  REGION 1..650: note = Description of Artificial Sequence: Synthetic Construct

SEQ ID NO: 7671 - protein, 686 aa, synthetic construct; identical to SEQ ID NO: 1171
  REGION 1..686: note = Description of Artificial Sequence: Synthetic Construct

SEQ ID NO: 7672 - protein, 107 aa, Homo sapiens; identical to SEQ ID NO: 192

SEQ ID NO: 7673 - protein, 159 aa, Escherichia coli [sequence omitted]

SEQ ID NO: 7674 - protein, 187 aa, Homo sapiens; identical to SEQ ID NO: 1

SEQ ID NO: 7675 - protein, 327 aa, Homo sapiens; identical to SEQ ID NO: 195

SEQ ID NO: 7676 - protein, 189 aa, Homo sapiens; identical to SEQ ID NO: 196

SEQ ID NO: 7677 - protein, 260 aa, Homo sapiens; identical to SEQ ID NO: 197

SEQ ID NO: 7678 - protein, 231 aa, Homo sapiens; identical to SEQ ID NO: 198

SEQ ID NO: 7679 - DNA, 714 bp, Homo sapiens; identical to SEQ ID NO: 1622
  source 1..714: mol_type = other DNA

SEQ ID NO: 7680 - DNA, 711 bp, synthetic construct; identical to SEQ ID NO: 1623
  misc_feature 1..711: note = Description of Artificial Sequence: Synthetic construct
  source 1..711: mol_type = other DNA

SEQ ID NO: 7681 - protein, 555 aa, synthetic construct; identical to SEQ ID NO: 1955
  REGION 1..555: note = Description of Artificial Sequence: Synthetic construct
